United States Patent Application Publication US 2016/0002648 A1 - sequence listing, part 5

SEQ ID NO: 4798 - DNA, 4605 bp, Sorghum bicolor
caggatgagaatctcctgaacttgttgcaagcatttgctcctctcaagcctattccggaaaatgccggaggtgtgactgtgatgccactcctggaccatccagacggtttcatggtggctagttgtcactgaaaagatgtcgtttcaggaatcaggtctctctgcggtttgcgcccctgagcaaagattcccaaatctatttggggtactgctagatcgcgtctttgtctgcagaatatgttttgccagctttcgtctaatcacaagctggggagcagtctggcaagtatttcaagatatttgcaacctgtttgcttataaattccacggtaatgtgtcgtaacatgtgcaataaattacttcatcataaacgcccgtgaaggccttttcaattaagtaacaaggtcaaatgtgcttaataagcaatcttttgtgttggagatgtgtgctcagttgaatagttttacatatcaattgtaaataaataaaggagcaactgtcacctggttgctgtcgaagaaatgcaaagctctcgtctcgatcaagtcttagtagcctacgcccctccttcctgattcaacaaagcaccgacattgtggaacaactgccagtttttgccactcagttttggacttttagtaggcctgcagagcaagtcacgctaatttcagtgggaagtgtacaacgctctgaagcgaagaaaagagaaactgcttgacatgtgaagaggtgcagtgaatgtttcacagaaatgaggctcagaggccaaatgcatccgcctggcttgagttttaagctgcatccaaaacggagggaggacttatttcaatgaatttttataatctcagcctccaactttcagtttcaggtgcattctattcaatgaactcactgaaaaagaccttgtggcctttgacctctattctatggtgtctggaggtttgtgatacatcctactaagactctatctactcttccctaagtcacacccatctgaagtgaccacaataattttctgctactttgtatcaagtggacagtaccaatgttccttataacggagcatatatggtgctaatggtgagatgactgaaagtgagcagaatatagaataaagtcacacagaaatatttctttgaaggaatgactgactttaccatatgcttacacaaccggcattttgtttttcaactgctgaattcacataaaatcttgtttgcagtggacttcttcaacctttgtttacaggaactgatgactaccatggttcaaatgtcagttgtgaattcagaacaagaaaaaaaaaagcttgtttcttctgtagtcgtgaattgtggtaactgaatgagttcagcagatatttgtacccccacccactgcatgcttatcatgaatgactctaatgaaacccagaagcccaaatgaaggtatcaactgagatgcctttgccataaacaatctgtttcaatattgaagatatgctgcctcttttcacttagtggcagaactgattgccacaccagttgtacttaactaatgcagttatcttaaccatgccggtttgccactttatgcccaagcactccctccccccactaacgcaccacaaactcactctcaaatttaccaaattggcctctgctttccggtcaaaagtcggtcaaaaactactttcttgatcgctaccgttgtgtaaacaaacaaacaagaaactgcaggttgttcaaaacacgggcaccatgtttggttcacagtactgaatttaaaccgtttcctatgaaattccatgataggacgaacaaaagctgaaaccccgaatgaacgatgggaccaactgaccgaacaagacttgttttgttcacactgcttgcacagccttgttagatgcacattggatgtgccacctcgtttacatatatataaatatacatgcagggggtgctctcgtgcaagctgccactggcaccggcactggcagctgcgaacggtacaaggccggcatggcattgggcgtggtcggcctcgtgctcgcattgccactcttgttcttgctgacaagggcggcatggatcactgtctcctgctactacctcacgccggcgaggatccggacaatcctggccggccagggcgtgcacggcccgccgccacgcctcctcgtcgggaacctccgcgacgtctctgccctcgtcgccgaggccaccgccggtgacatgagctccctgagccacgacatcgtcggccgccttcttccccattatgtcctgtggtccaagatgtacggtgagtacgtagctcacgacacgacgcattgccggacggccggtgccggtgcccggaggagctgaccggaggtcggcgttttgcttgcgcctgtgcagggaggctgttcgtgtactggtacgggagcgagccccgggtgtgcgtgacggacgcgggcatggtgcgggagctgctgtcgtcgaggcacgcgcacgtcaccggcaagtcgtggctgcagcggcagggcgccaagcacttcatcggccgcggcctgatcatggccaacggcgcgacgtggtcgcaccagcgccacgtggtggcgccggcgttcatggccgacaggctccgtggcagggtggggcacatggcggagtgcgcccggcagacggcgcgcgcgctgcgtgaggcggtggcgcgcgccggcaacgaggtggaggtgggcgcgcacatggcgaggctcgccggcgacatcatcgcccgcaccgagttcgacaccagctacgacaccgggaagcgcatcttcgacctcatcgaggagctgcagcggctgacggcgcgctccagccgccacctctgggtccctggcagccagtgagtacgctacaaattcctctgctttcacctcgaacacggtttctttgccctcgagggcattaataagtgtgcaaacacacatctcaaagcagattcacattaagatgatctcaaagtagattcacattaagatgtatgtttgcacacttctcaatgcgaattcagtggtagagagagtgagagcacataccttgagggcaaaaataactttagcgaaacggagcatctgagacgaagtacctagcggtgccagtgctcactgacaagtgtacacacgcctttcaccagtttttttttaaaaaaatatttttttatgaaacaaattccaggtatttaccaagcaaatacaggcgggaaataaagcggttgaacggggagctggagcagctgctcaaggagtccatcgagcgcagccgcgagatcgccgacgagggccggacgccgtcgtcggcgtgcggcatggggctcctcggtatgctgctggccgagatggagaagaacaagaacgacggcgagctggggtacgacgcccagatgatgatcgacgagtgcaagacgttcttcttcgccgggcacgagacgtcggcgctgctcctcacctgggccatcatgctgctcgccaccaacccttcgtggcaggacaaggcgcgcgccgaggtcgcgggcgtctgcggcggcgcaccgcccaccgccgaccacctccccaagctcaccgtggtaagccaagccattgactactgcgatccacgcgtcgtcccattccgtccacaccacagctcacccatgcctgcctgcctgcccgcagctgcagatggtgatcaacgagacgctccggctgtacccgccggcgacgctgctgccgcggatggcgttcgaggacatcacgctcggctccggccccggcgacgagctgcgcgtgcccaagggcgcgtcgctgtggatccccttgctggccatccaccacgacgaggccgtgtggggagcggacgcgcacgagttcaggccggaccggttcgcgccggggaggccccggccgtgggcggggcggttcctgccgttcgcgtcggggccccgcaactgcgtcggccaggcgtacgccatggtcgaggccaaggtcgtgctggccgtgatgctcgccagcttccgcttcggcatctccgacgagtaccgccacgcgcccgtcaacgtgctcacgctccggccgcgccacggcgtgcccgtgcgcctgctgccgttgacgccgcagtaggctgctcttggtgttcttgcttcttcacaattttggaacatctgtgttttacgtttgtgattttcttttctttcttttttttttgtgtcttgactactagtagatggagaaaattttgtgcttcggttcactagcggtggtctgacatatgtagaaatataacataatattattttacttatttagagtcaacattttgttgacggtgtttttttgtcagtgatgagaaacaatcttgcagattgtatcaaaaatcgaagtgtaaaaatgtcgctgagggcaggagattcgccggaattgattttccattagtttggacggggcgggatgtacttgataccatagaatatttcaaaatcgaaccaaatcataaaaagttgaatctcatatctatatcaaaacataatacaaagtaaatataattttgtccgcgggacaagactgtgatgctgactataataagtaataaattgcccactcaggcacttaggataatgccg

SEQ ID NO: 4799 - DNA, 5464 bp, Sorghum bicolor
gacaagtttaaggaacttctcgtcttctcccgccgtgcccaatcctaattgatgttcacatcacgtttccatgtgccgtctgataaaggcgtgcaagtgtcccatctcgacagggtagaggccgtgtcaaaagcttcgtggcaagtcgggcaacgggcagaggaaaggaaatgccattccgatccatacgtgctaggcagcctgcgtggttggaccagaatctgattcgactcggtgagatgagaagacgatgcctggccctagacacaagcacaaaagctaggtatgaatcgaaatcttcttagccccacgcccccacccagctgccacggagaaggccctgcccggctcctccttctgcccttaaggatcaggaccacccctcctctttgccggcgttgaaaccgaccggatccgcgatcgccgctagtcgtcgtcgagcagcagcagcagcagggagatcgatgagcggcaaggtaataaccagaccaccgcggtggccaactgtttctttgctgcggggtgttcttgtgacgtgggtgcagcagcagctctactgcatgacgggtgctaccagaggatcaggagacacatgcaatgcaagacctggacggacagccacctgatcgaccggaagcagcagcgggtgagcgtctgcggcgccttcgtgccgcgggacgtggccatcaagctccgcaacagcaccaaccgccgcgtcgagatactcgacatcaaggaggtcgtcgacgccggggccggaggcgaccgcagcggcggccagcagccgtccgggaaaaaaaaaaaaagggaaggagtcgccgacgccgtaggacaggacgacgcagccacacacgtttgcctgtcgaccggccgggctctaatgtagcgcgaatgttacatataatctctgctcgattgaaacagatacgatttatggattatccggcagcaagtgttttgttcatgcacgccaaaggtaccaataacaacgctaccagcactgagctctcaagtctcaactaaccaaccacgaggacgaaatcacacacagatgctaggtgatgacacttatatagactcactcaccgtctcacaaacacgatgcaaatggtctgcacccctgcagcagccaggctagagagtcttctgaacctgcacatgcttggtgcccagccttcaaaggcatccagtccaaacaaggtaaccccggcaaacgtaagagcagcagcagggctgccttcgagtgcagtgcagcctcccgaaggacaagcagcgccaaccatacacaacacagggggaaatgatccatacatcaacaactcgcttcaacaaggtactcacagattattgacagttaacaggacacagtagcctataacagattttgtaccgctgctgctggtaccgtgacaatgacagcgtggccctgttcacttggctgttcgctgatttattgtttgagaaaaacattgccgaatggctaacaagttcggcagataaactcaagcgaacaggttgtaaccattgcgacaacctctcaacatttgtgttgctgcgatgaggttcatcaccaagttaagattgttgcccactgcccaccaaaccatagcacaccggaccgaaaaagccggccttggtaagtgaggcggatgcaaaagaaggtgaaaagaaggctctgtacctgtactgtacatgaagtagctcttggcaggcaccggcaccagcaccagccacgcatggtaaagccagggtttccttggagtggcgttaaagcctgcagaggtggatgggcagcagcagagcagagagaacaacgaacgagctcaccgttcgctggccagcttttacggtccggacagcagcaaatgtgaagtgtccgtccgcacacacgtactccccgtcctgttgttccttttgccacagccattgggagctcgttgtgcgacaaggagagcttctccccccctctctagctgctaactcatgatcagcagctgaaaatgggcctggcggtgaagcgcgtcttcctcctcaccgcctcccttgtcctcctcctgctcagcttcgagctcctgctgcagaacgaggtcctgctccgacgtgtgagccatggctgcaacgaggtcagtgccgtggcagtgacccgtgacgccggttctggtttcctctccaggttcaggatgctggcggtaagcctggatcatcatcatcggtcgccgccgcgacacccacaccggagccatcaaaagagttctgcagctccagctccagcaccggcgattcaggttcatgaagctcttcccactccgactccgacgctggctgctcccgctcctgctcctcttccccatgagagtcatacaaggatgccactcagaaaccacagccgcattgccccagcgaggagtgtggcacgcaaactgggaggtggaggaggtcacgccaggctcccgacacccaccattgtcggcctggctgtggctggagcatgtctgcttgttctcggggttgcagtggcagcagcagcctcactcaggagatcaaggaagcttcagaagaagcctttcaagctgttttcccatggatcaagagctcacaggtcaacttgcgctaccatcaaggttagttcgcatcccagcgcagatctgctttacccgggttctgctgtgcaatgccaggaggactatgcgatcatcaaagaatcttcagagtctaagagcttatcagttcttctcactccatcaataagtagtgcagagttgatcataagcgattatgctgtgaaaaccagcaccagcttgcagtctgatgaagctgactctttccgttcattgccctgctctcattcatcaggtggctccattacagagttgccgctgccaaattgtgataaatctattgcagatccttctccatcttctcgacatagggatgattcaccttctagttcatcatatcaatcactatcaccagattgtagatctcccttctgcccaaagactccacctttcacagcttctgatcaagcccatgtgcagaagaccttttgccatcttccagaaaatccagctgaggagaaaactgaagtaataaaccaccaaaagactgcaaaagctaccaacaattcaggatccatgggacatcctgaagctccaaaagtagagcaggtcaatgcaaagctcaggtatctctcgtcaggttgcaattctaattcctgtgctacagagatcacatcctccgaaacaaactcagcattcagggtgtcaaatacagacattaatttggatccaaaggaatcaatacggaactcagctgaagaagccaagctaaaaccatctggagcaacaagtataccaaaaacaccaccaccccctccaccaccaatcaaacctacttcaagtcttaaagggcagaactctggccagcctccattgccacctccattaccgattcagttacaagttggcaaagatgggttaccacttccaaggttgaaacctctgcattgggacaaagtaagggcagctccaaaccgctcaatggtgtggaatgacattcagtcaagttccttcgagtttgagtaagccacaaaatgattcccatcaccagattgtcattttttcctattattacatcttacaacagcatacattatacagatttgatgaacagatgatcaagtcattatttgcatacaactttcaagggcaagcaaaaaatgaggaccccaagagcaagactttagctaccagcaaacatgtcattgagcaccacaaacttcaaaatactactatactcttgaagaccttaaatgctagcactgaacaagtctgcagttctataacagaaggtatattatcttgctgcattcggatttaaacttaccaagtaaatgatggccagatgaacctactgtcatgtcttcaatcacaggtactggactgtccacgcaacaactagaagcgttggtcaagatgaaaccatccgaggaggaggagaaaaagctacttgattatgatggggacatcaacatgttggatccagcagagaactttgtcaaggtgctactgacaataccaatgtcattttcaagaattgaggcaatgctgtacaaggaaacttttgatgatgaagttgcccatctcaggatgtcctttgcactgattaaagtaagtagagatattcaatcgatttagaagatataaacactctgttcaaactataactaattctttgtttactagggagcctgcagtgaactcaggtccagcaaattgtttttaagattacttgaagcagtactcaagaccggaaacagaatgaatgttggaactataagaggaggggcaagtgctttcagacttgacgcactgctgaaactgtcagatatacgtggagctgacgggaagacaaccctcctgcattttgttgtccaagagatggagcgattacaaggatcaaaggcttcagataagctcagtggaacttctggaccttgtcaagccacactggcagaaagagaagagtatccagaaataggtacagaatttgtttcagagttaagtaatgagcttggcaatgtcaagaaggtagcaagtatagatttagataccttgaaaagctcaatctcaaatctatcacatggactggctcaactgataaggcttgtcgggacggagcttaccagcaatgacaggaaccagaacttcctgcagtgcatgagatcattccaaactcatgcagagaataccatgcaggaactcaaggttgacgaagccgaggtcctacagcaggtcagagaactcacagagtattatcatggagaggttggcaagaatgagtccaacctcctccatatatttgtcatcatgagagattttcttggtttgctagatagggtgtgccgagacatgaggggttcaaagcacatccaacctccgaacatagtctttccgctcaggtgaatatgtttaatgatcagacttcacattaaccagttggacattaacaaattaacttttttttgtgtgaatgtgtgtatagttattagcttgagatgggtttgtatcagttacggagagtttgtatacatgcagaattgtattagaatgatggtgtgtttagattgcatggttttcgatttgttgaatacactcacaagtcacaacttaatgctgaccatgttattgttttggagggtcctatatactcctgtagtcactggtaactgccaaacatgtcctcttgtatattttcattttgctaataatctttaaaaatttcaaactccaaagacagcatgcccaggccactgttgcagtacacgtcagaacagtacatgtccatttacatgccagtctaaggacagcgaggaattttcccaagatatattcagggaagatgggatctctaccactttacaaatttcaagaaaatatacttcccagaagataaatgaaaaagg

SEQ ID NO: 4800 - DNA, 5428 bp, Sorghum bicolor
ttctaatcacagtacaaggtgtatgcaaccaaagttttaacactttgaaactacatttcatgataaatcttagaagttttgttttcgtaagtccattattcaaaagatctatgatcaaattaaaatagttgaattgacgcaacaaaatagcgttgatgttttaaacacagtgcaactggcaatattagcctgcacagggcacaccaactttcttggctattatgatttgctactcaaggcctcccttgcatagcttacgagaaaacatatcacttggctatcatcattgcacaaatcacacattgcgtaaaaaaaatgctatgcatttatgagctgaagcttgaagagcgtgttaataggttgttaaatttgcttacagtgtccatgattatgtggggctaagttaaacagaccaccgcattttactactgcacaataaatatcaaagtctcaagaatgattacgcatgaccatgaacaatcgaatacccaagaaactaaactaagaaatcaacagccagtaatgaagtattattttccaatgtaatgtgcagctcaaggctgttgaaatggataacaacatccacaatttgatcacaattcattagattacatgcattttctgctggtataaacagattgttaacatgttgattcagccaaattaaaacacaaaccataattaaattctcaattgaatatacagctccattttcaggtggtaggcaagctcttaataaactaatcaagcaaaatccggacacaggtcttgacagttcttgaatgttgccttgatcagaacatgttctggcctccaatataggctttgcagttacagagcttatctgcactgaccctggtggcaacaagtgttatctaacaatatttggggagatggagaaatagcttctggatgtttgttaatgagaagctgaaatttggcttctgagaaatagggcaccatggcataccaatgaatagaaagaataacatcccttgccttatcaattcataaacaataatctgaaacactctaatatcagaaccaaacaatgttgtcatatatgcaaaaggatccatagcctagtagttgactccagcacctagatacaactccccatggagcaattttaagggtagttaaaaaaactctcgctagcaaacccataaaatagtcatattatcatcatcaatgtggcaaatgattctgatcgctgcagccactaagtgcagtagagaaattatctagaggacatttaagttggtaaagaaatatttgtgtaattatcaaactgccagttgaagacaattgtagtccctcttcgttataaagtataaaaaaccatctaacttcagttgcattgaacagtacagcagaggcaacttgctgatttgtttccttgaccaaaagaactgcatccaaaacattatcggtggaggatatggttttgagcatatcttgacaatgtaacaatactacaaagaaaaaaaaactagtgacacagctgcaaaagaagaaccatccagcaaaagttcagatctaactaatgatatgaatcaaatatctcaactattttcccacaaaaagtttcacttagacaatgcctgcaaatgttacatttgagaacttccataggcggcgtaagcacaaaaatgcacttggaattaaaagttgtgtgattaataagttaacaagttcaatgttccatatcactatatattttggtggtagcatgtattactgaatcagagtaagaaaaatgactaaatttactatggtttagctaccatatgtggtctgtctgcctttaggtagtagctaaacacaggttttataaaaggcagatctcttgtaaaaaagagctataggtttgtaaggcaacctattacactgccatttatagtgtgtgagcgtagaccaagccaaaagctcatgaaatttgactggcatgtcctgccttttgattctgatatagggatttaagaaaaacaacaggggccatgaacatcatggtaataactgcaaatggttccaacctgcataatgtagccgctatgaagcatcacctgctatattcaaactatgttgaccccaaatagaaatcacaaaactgaaacaaacatttcatatactggttacctttcatcctcaagaacttctgctggacacacacattattgttggctccaggttctgatcatctcaaccataaccaggatgaacgtggtaataaactagtcagttttaagtgaaacaaacattaacccacaagcaccaagcaatgcaacttttccatatttttgtccaaaataattcaagatggtgtaactttacaaaaccaccaagaaaattattttgaaaaggtgaaaaatatttataacttagagcaatatatctatatcgcagtggcatcttggcgccctgtttgtttgagctttgggccacttttggactttctaaaagccaaacagctgctagaagccaaaagcccagaagctcacttggcttcttggagctttttagcttttgaaaaatccaaaagctcctaggaagcccaaaccaacagggctgcattttagaccaattattctcaactatgctgagagcaatttactcaagatgtacagcacaaatatcccaattcctatgctatagataacattttcagaattttctcaatttatatgctataacattttcaggatgcaacactaagttcatgttagatggtaacatcctcatgtttatgtatgtaggagaagaatacaaaagtgaacaaaacttaaataaaaatggtacatacaacatgtttaaaagagcaaagttcagatcaagtaatcttgtgagcaaacatattttgataagtaaacaaggatgagaaataaagtttgtgttagcgcatctccagcaagacccctatactactttgagagctggatagcaaaaaacccactctagcaggaccctaatcaggctccaaaaagtaaaaggccctcaaattctcccctcaagccccttcattcatagggactctcgaggtcacctctacttttttgtctttcccaccattcctctccctcttcagtgcagatcccacccacactcgccagccaaaacaagcccccagtcccctatccctgctgagcccctccccaccatgggtgcccatccctgcaacaggcgcctctccctgtcatccctcactgccgccgaacatcagctcatcgagccactccatattttttctagaatgtaaggagagaatttctcttgaaccattaatagtttccaaaccaaagatgccttcatacgagcttatagctcacaaaaatgatattgtgtctacatgtctctgtaggatcagattgcttgttgcattcttattttctttcattatttggctcttgttgggtacatgggtttcaactctactaaaacccaacttccttcgaagcaagaggttttgttctttttgttgtagttgtaatccatatgctaaagtagagatcatttggttgtccagtcactctcatttatgttaattgaaagcttttccatcttactagctctggcaaagggaggcaggaagcttgaggcagcaactgcataacttgcaagagcaccatcggtatgaccctcaaccaacctacaataaatatttcaaatcattatgagaaaaagaatgtgtctactgaaattattttttccctagtatgctaactatcatagcagagatattgtacttacatcagaggaaacaaacaccactagaaagagaaattgtaattttatttcatgctcagacatagaatcaatgggaacaaggtcctaaaaaataaagatcaataagaattaaggacaattctcagcacatggtgatgaattgcaagatgtaattggttcaatgttccatgtgtatctattaatgctatggacaggaagtttggagtcaccaaaacaaagtttaaaccttatacagtatggctccaaaactttcagaaacagcaataagcaacaatctgcttcattactctatctgattaagtgtgtgcccttactcctcccacaaaggaagttatgttatgcattggttaattcaactgtacacttgatggctcaaaaaaaattgattgaatttgatggctacaaaaatggtactttattttgacgttcactcataaacgtgaagtaggatcgtacattcgtacaataacatgtgcattttcagaaaagcataagctaatgttctatacatttttttcactgcagacagttgttgggtcagcagctttctggcctggacgtgagagatttgcagaatttagagaataagctggagatgagcctaagaaatattcgtctgaagaaggttgcattacagattctttagactccatcacatacttaacaacaaagataccagttgctaccttgtttactaactttcaatttgcaggaccaacttatttttgatcagattcaagaattaagcaagaaggtttgtccacacagcttattcaaaattactaacatattgtaaggtctcgcttgactacacaaacttcttatttgaattatagggaagcctcatgcaccaggacaacatagaactatacaacaaagtcaaccttcttcatcaagagaatattgaattacggaaaaaggtacatgcatctggaaatagttagccaaaaaagggtgcaattagaataactcatcttttgtttttttattccacatgtcaagtgtatgtgaatcacaaccatcatttctttttcatttttcaggtgtatggacaaggagtaaatgagcatccaacaagtactacagttagacatagtattctgaatacagagaatgaagatgttccgatcaatcttgagctgagtatgcaaagggacaggtcagaaacaccaagtatagggtgagatttttgtccaaacttcaggacaattcagagtcagtcaacaagatgatttaagaaagatcactgaaagtgccataggacttcaaatgcagtgaggataactaactaagagaacagaaatcaatactgttggttgaattgcaagacctaacagctaaactttaagctgctagatgcaatagtttctgtatgaagaggaatgttgatttgaatttagcttttcatataagcttgccgtgtatgtattgtaaattgtactctgaattataagttgtcttggcttttctaggtacatagcttttgctattcacctagatatacactatctcttgatccaaaacaacttataatttggaacagacggagtaacttcaaaagatggtaacaagttacacattggatgatcttctaccattcgaacttaatagaaaacaattcctttgaactcaaatgaaaacgtatataatagagaatagtacagaggatttagtaaaatgatga

SEQ ID NO: 4801 - DNA, 3274 bp, Sorghum bicolor
gaggacaaaaattccaggaattttgtcctctagtgcatatgaaaatgaaaattattatttttatataaatttttacaaaatgaatttgaatctcaaattttgtgaaagtgtacatctatagatccactattgttgtgcatagtttcaaattttttgaaaactcataagtatgattttaaaaaaagtttccacgatcgaagatgtgatttgcacttaatattttagccccgacactccagtagtacgaccctcacccacaagtgtgagccccggctctcaagacatgtccaagttagtctatgagaagaagataagggcctgtttggtaccccttgctaaattttaactacctaaactttagttattttattaactaaacttctaaacatattgactaaaaggaggtaaaatactagccatatagctgactaaatttaaacggtaaccaaacaggacctaagaaagggacgaggactaacgggtctagaacaaacttgatgaccctatttttgagggctcctgctagagtatatccaggaaaataggaccctttaaaggtagggaaatcctcaaatgaaaaaaatagaagccccgtttgcattgagggctaacgctagagctgctcttagagccagtaaagtgttgatgatactgttgatggcactattgagggtaccttatgttgattttatttgagatgggagagtactgtacatgcatatacaccgcgaaacgcaataatatatgcatagctcgccatagcttatccagcattgaccctgacccgtgacccctagtgtatgcatttcttatatcgagtgtgcacctttctccatgactccatctctatctgaggccttaccctttgtcctcctgcttttaggccctactatagtatttgttttagtttctctttccggcccttttgtaacaatgtacacatagctacacacatgtttcttgtataaaaagcagtagtagaagtaaggccttgtttagatccaaaaagttttttgattttgacaatgtagcacttttgtttttatttgacaaatattgtccggagtaactagccttcaaagattcgtttcacgatttacagtatgcacttagtttttgtttttatctatatttaggccttgtttagatgcacaaaaaacccaaaactttacaagattccccatcacatcgaatcttacgacacatgtatgaaacattaaatataaataaaaagataactagttacatagtttatctgtaaatcacaatacaaatcttttaagcctagttactccatgattggacaatgtttgttaaataaaaacgaaagtgctacagtgtcaaaatccaaaaagtttttgaataccttaatgtttcatgtgctgaaagatttgatgtgacagagaatctaaaaaagtttttggtttttaggcgaagtaaacaagtagtaaaactagcaggtaggtgcactgtacgtgcacgatgctccattgcactaacaaaaggcagctgtagcgctttatatataccactgcggcaagaagctagctagcatgcacttggcttctaccacctctgttacgagtgttagttagtactcaatccatcccaaattgtaatccattccaaattgtaagttgtttgacttttttaatattaagtttgaccactcgtcttattcgaagttttgtataaaatatcacttttttttgttgtgtattggtttattaataaaagttcttcaagaatgacttaaatttgactatatttgtacaattttttttgaataagacgagtggtcaaacttggagtaaaaaaagtcaaacgacttacaatttgggatggagccatatagagacaaatagtgcaagtgcacaacaacacacaaaacgcaacctcattaccctaacacagccggcctctcatcaccatcatcatcattgcgtctaccagcaagagcagtcatttaccgaaccctactgcagctgctttgttttcttatgccgtcgaccgcgatgtcttgggacgggtacggcgggcagatcttccccgccgacatgtcgtcgttccaccaccaggacaccctggaggccgtgttccggcagcctgagacgacggcgcccctgcaggcgccggcagcagcgggggagatggagctgctgctgaggaacgggtcgcccgtaccggtggtggatgccggcgtccatgccgcggccgcaccgcggaagcggccgttcaggacggatcggcacagcaagatccgcacggcgcagggcgtgcgcgaccgccggatgcggctgtcggtcggggtcgcgcgagagttcttcgcgctgcaggaccggcttgggttcgacaaggccagcaagacggtgaactggctcctcacccagtccaagccggccatcgaccgcctcgtcgacgccgccgagccggcggtggctctagtctcaggaggaccaccgacggtggtgaaggggagaggggaggggaactcctcaagcacttgctgtttgacggtggactcgagggaggaggcgacggagaaggcaagaagcagaggcggcggcggcggcggtaccggtggtcctgatgggccaccggcgctcatggaagaacacggccgcggtgagctgggctggatcatgacggaggccacagcggcagcggcggcagcaacggcgcagccgcagcagatggacgggctggagtactactaccagtattgcctgcagctcgaggagatgatgagatgcaacggaggaatgccaaggtgatttcttgtatggtatgcaaacattatatataggtctataaactctaacgcgcgtgaggatttccattacgtaattaggcttcttctgccatgatccgttgctacatagtacatatataaatcaactggtggtttctctatcaattaaagcccattagcccgggtttgtgtattgacatttggttaatgacaattaaccttattataattagctattgctgtttgtcaattattcatacaattgtgctaatgagatattcgttacttttatttaccgtactgatgctgtaactttgatgtttatgaagttttgcatgttctgagttttgtataaaattccatgggcatatgatccttcaaacacaatttgaacatgggatttcaatcatcaattatcagatgaaataaaaacaactatggaacctatagctaataaagctagaaatttaattacatatcactcttcaggcaagatactagtgcccaaatattaaccaaggg

SEQ ID NO: 4802 - DNA, 6864 bp, Sorghum bicolor
tgatggagtgatgaattgatgaatgtgtttgaaatatgcttttaaatctgtgtttattgatatgttattgttcaacgggctatgggctggcccggcctgacgggcccgcccggtacgcaaaaaggcccacgggcccgtgcctgggccggaggtcaggcccgcaggccggtaaggcacggcccgcagggcacgacgggccccctcggcccgttaggcaacgtgccgggccggcccgttgcccaggtatattcctacttgcctctacctccatatgtcttttcctctttcactcgcgcctcatgttgttattatgaaccttagagaagaagatgtaacatatagaggtttttaattacattatgtttatcaaaacgatattgtcaatacttttatgtgtgtagcatattaacatagaaaaatcaagaaagttataggcttgatatcatgttgttaaacaaaagaaatgtcaccaatagtgcatattagaaaatatatcatacaacgataactaaatttgaaacaaaacaaatcacactatgcatattgttttggaataggacatggttcacatcctcatttatttgaaaattactcatctatctgtgtttaaaatttatccataaatggcattcttgagtattttttggatgggaacaacaagaaacaactaatttaagagaatgtctctagccaaaatagcaaaagtccattaaattttgacttatccttgattcaaacgaggtaagctagactctattttgtgacttccaatgagaaagggagcgatgaccattatcaaatatggcactattgcaatgcttccaactggtgcaacaagaaacataactagttccttgaaaatgcacaaactatcatatccaactgttggagtgatatattcgagacaatgagtagagaggtccaacaagggactgactgaaaaggcacacaaaagatgcatatgtgttttctcaactcacgaattgcatagagcacaattgttgtcctcgagatgcttattctttctcctgagaaagtttgtagtatccagtttgtcccttaattagatgaatccaaaaaaattatgtttgccaaggagatttgaaaactccaaatccatttgaagagtggtgaaactggcatggctcccaacaactgtgaatatgacttttgggaaccaaaggagtgggatcccaaatgtattcccacctgtcatataaagaacaaaagaaggatctaaactctagcttggcagaggcaagaaaaagttccgattcaatcgaaggattgtctagaaaaaaaccactgagtagtttgggtttttttattccatcttggttaaaacctgctttattaagttatgtccctaccttagtctcccggacaatccatagatggtctatgtcctttaatgattattatatttgagagtgaccaatgcaatcaaattaattgagtgcaagaagctcaaacgagacattgtttgacatagaaatggcttaaaagggaaggctacttattaatgagaaacaaaaaaacatggaaatttccataaaaaatatgaccctaacgagttgcttcccataaaatttccacaaataaccttacgagtttaaaaataatttgcatttaacaaaattcttctactttttttaaggcaaaaaatcttctacttgaagcagcaaccaaagggtgacccattagcccattgggacctagggctgccttttgtagtctccaccaaccacgaaagggcacaacggtaattcaaccgagggcctcatcaagtttcaccgtcggaactgagaaaaaaaaatctgtaaagaccagtggcccagaggcccggaccgcggaccggcgctggcctaacaggtggcgctccccacgacgcctaccaaatttactgggccacaaataatccggcgcctccaagccgcacgtcgaccggcccacggagcatcaccaccgcaccgcggcagctgagctcggcccccaggattcagaatctccgaggcgcggcgacgggcggtcggcgacatggaggccgcggtgcccagccgtgttgcgctctccgcggcgagccgcctcccgaatcgccacgccgtggcaggtgctccccccgtttctggctcccgtttgtcagtttgttggaatttggatgcgattttgggagtaagtagttagtactccttattagtaccgtgcagtggataaggtcgatacggcaagtagggttcgtgctgtccacgcggttcctatggagctagaactgtggggggatttcacggagtatgagagccccaagtgctgttccgctttggcaaggagtttgccaatattgtgaagagagaatccttctgtttcctgccatggaatggccaccttgtgttggctagaggatgtggactcgacgtgtggtgaaattgttgcgtctgttctagttagtggcaggaacaagcgtgcaaggtgaaggttaagtggttaatttcattggcattttccattagctagctgttagttccctgtttgattgcttcagtatgctttattcatggactgtgctttgcactacagttgttgcccatttttcagtccagattacatacatattaacaactggttccaactgctaagtcacctatccgaactgctaagtcacctttctgaacagatagcagtgttaggagactagcagttgttatagtgcacagttcagtttgcagtagaagctgaaatttaagacacactttatactactatcgatgtaaacaatcagttgcacctgcctgccattctccacagatgaattattccatgctggatgttactagttgctgatagttcttgatggtgttcttgaaaaccccaaatgactaagatgatgattgaatccaccatatcataccctcacttgaaatgtgtaggaaaccttgctctatcaccaactaatcctcaaccttgtagtcctgtttgttgttgtatgatcgtgaggttattattccattttcgttcattttgttttcagcctggaggcacaaatgtacgatcaagaactgtgctagctatatgatgacttccaatttacatggaaatattgtttatcatgtcataggtccatgattactgttgcagacttggtggtataatcttttgtgtcgatattcttgatattgtgcaggagatagatcttttgtttacaagggaagatgccagagtcttgcaattcctatggcgctgtcagcagctgcaccaggcaaagggggtgtgcttgatcggccagtagagaaaactactcctggtcgtcagtctgaatttgatgtgaagtaagtgttagccactatcacctgtgcttctattcctagtaagtgtaacttccagaactgtagggatatgagttctgtcgaaacagctgatcaagcaaaaataaatcaataagtggtttcaaacagataaagaagttgtcaactactatgtatttgtttcattgttactggaacaaggcttaaccatttatttctgcacaaaatcaataactgaaaattttgtataaacacttaagggtcaggagtacttccaaccgaacttgatggctgcatatctatttttcttactgccatgtgcatgttccttcacgtttctagaaacttgtttttgatattaccatcaccaattggggctcatcatggaatcaaatgcaatgcttttttagtgtgctttggtatggagggacaaatatctgggccagctagtacctatttctacaattggtagatatatggctgcttctagtttggggtcttcttatgcttagccatgtaatgttaatgttgggtgtgagcaggtgaccttcttatttgattttactttagaagaggcttcatgcttcatctccagggttacattgattacatattcttattgtataccttcatgtataaccattagtgtaaatttgctagtgtttggagtatatctagttcactccaatgctaggattagtgaatggtacagcattccaacctgttcccagtgatgtgggttggatattcagtttccttttgaaccaggattttctttttctcgaatgcgcaggagagctgtgcatctttgtattatagagagaaaaggatcatccccttacatgaacgccaccaccctactccgggccgagccatgaggggttgaatgaaacaaaataggttgcactaaataaacaaccaagatggatgagacttgaccaaaccacaaaagctagaataactagcccagatcgtgacctagatcgagagtccgtaggccttgtccgcctgcgagacaccacaaatcctcttccttgaaagcttccatgaggccagaaatccttggttgagcaccatcaaagacacgcattgcgatgtttccaaaggatccaagcccctagaataatgactgtattcagccccttcttcttatccttctgtaatttcttgattgctttgcaccaccaatcaccgaaggaaatttcatgagggctaggtattcgatcttgcagacccaacactaaaaatatttggcaccagaattctcgtgccaaaacacaagtggtcaggatatgttggatattctcctcctcctgatcacagaaaggacagtgactgggatgtggaagacctctcctagcaagtctgtcagccgtccagcacctattccttatggccaaccaaatgaagagtttacacttcgctggagcccatgatttccaaactcgccaccaaggctcgaaaagtaattgatccattaaagaaggctcgatatgcagacttggaggaaaaatggcaagatgtttctagcctccataggtgaacatctgcatcctgggttagcacagtctcatgaagtaaatcccataactgaaaatactcaaacaaaccgatgaaagtgagtcctcctctgatgtctgtcggccagtcatgatcttgtgacgcatccgctactgtgcgacgagcacgagcattctgtggtaccgcggccaccacactcggtgtgatatctcatagtgaacaccccataagccattgatctgaccagaaaagtgtgctactcccgtttccgacccaagtctccattgcagtattgaacatagccgtgccatttgggtgcacctgtatgtctaggccggcccaagctctgttgggatctgtctttttgagccacagctgaaccaggtttttcatctaggaggtttgctgctatcgtcaatttctttttctcctaaactctgtagttcattgtagtttaccagaaataccagctcatagaactatagtagtttttttggcagggctttaattactttgaaattattaaaacatgtcttgaacatggcaatggcgtcatataattgttggagttggaccttttagttttaggcctctatctcgcaccgcaagtgcctatacctatcggatgtagctggttcgatcattttgtttgtgcacttatttcagactttcaacaacattgcagttaccattattgtctatggcctgttggcacattgatgcttagtaagaaaagtgatccaacacaccaggctatcttgtgaacagcttatctcatgtccagtttcaggctatctaaatagatgctattgtgctgttaccattctaaaatggttgtaatagtatttggcctatacctgattgtagacatggaaaccatgttatgaccaagtccttctgctctgcaggaaatcccgcaaaatgtcgcctccataccgtgtcattctgcacaatgacaactacaacaggcgcgagtacgttgtccaggtcctgatgaaagtgatccctgggatgaccgtcgacaacgctgtaaacataatgcaggaggcgcatgtgaatgggctgtcagttgtgattgtctgttcccagtccgaggctgaggagcactgcacgtcgctcaggggcaacggcctccgaagctcaatcgagcctgcgagtggtggctgctgaggttcgagaaatgggtgtaccttgttttgccgcgtatagtttgtaaatacccagcatatcaaagataaactgaaacaggttggttacatgcagttatcgatacaacgaagctgagtatctcttgggtaggtgtaaatcatgcaagcgtaccaacctgtagaagaagaaacatagtattttcggttagattacgatttactccaaccgttcaagaaagagtcactatgggagtcaagttagtcaaactttctgagtttgactatatttgtagaaaaatattagcattatatctttaaataagtttgttatgaaaatatttttagcgatccatactaagtatataccataaatattatatatatttggttaaatttaaaactgtttgatttcttgagaagtaagaatagcactctttaacggagggagtatggaacatttagttccgcttggcttgcactctcttcttttttgggcattgctccatgttcacgttatttatgttaggctgcttctgctggaaaaagcaaaaggccaacaaaaacaggtagggccttgtttagtttccagaaaattttgtaaaatttttcagatttcccgtcacatcgtggagcattaaatatagataaaaataataactaattacgtagtttttctgtaatttgcgagacgaatcttttgagtctagttagtccatgattgtataatatttgtcaaatacaaacgaaattgctatagtgctccttttgccaaaaaaattggaaccaaacaaggcctaaaacggattttcagaagtagtcacttttgctttcacgtagtataattttcttagcaccttagactttacttttggctttcagttttggcatttccaaat

SEQ ID NO: 4803 - DNA, 6147 bp, Sorghum bicolor
taaaaaaagcaaaaccaccgtccaaaaccaccccaggggttatttgaccggttttgaaaattaaaagagtagaaaaatctggttttgtagtttggggagtgaaatagttcattctaaatagtttggaaggttatatagactttttctaatataagtcgttgtgggatttaaaaattgtctcacaagactgaacgttatagccttataggtctaatcctacccatcttaccctgtcgtccattcgcttgaagacagattaaaaagcaaaaaggcgttgtactaatgggctaatggcgtctatagtgtgaagaatggactaaaaaaaaatatttcaggcgtgtttagatttattttttttagattttaatattgtagcacagcatttgtacttggtaagctcaaaattcatcttgtgatttacagataaaatatataattagttattttaatctatatttaatgctccatgtgccctaagatttgattgtaaacttttgaaattttgaagggatctaggagctgtttggttgctagccacagtttgccacagtttgccacactttaccttagacaagtttgactaagttggcaagtgtttggttgacaactaagtttagacatgatttttttgggctccacatgtcatagagttaaaaagtgtggcaagattcctttagacatggcaaagtgtggcaaccaatttactagccacacttgcctaaagttagttgtggtagattatggctagcaaccaaacgtcccctaagcagtcccttagccggaatgttgctctcgagctttattagcacatcaacgtcacctaccagattgccgtatagaggtgttagagtaattattatattatagtaggctgtaagagtactcccaatgtagaaactatcgtggtttctatatatattaattgtagtgtcacctaagtatttttctgatgtggcaagagagttattgaagagagagagcaaaaatcatataaactgggtctaagttagaaaccatatctacgcaaaatccaagacatgaagtgatatgattggctaagaatgaagagagaatgaatgtgattggataaaaaaaatattctatagaaactatctattgggatcatagtttttatataaagtgtctataaaaattaataagtataaaaactacgtatattttctagcactggaagtgccctaagccggctaaatgttgaggtgaagaatagaaaggaggggagagagaggagaagcagactgtgagagcgagcttaagtacatgaactaagaaaaataaatatgttatatattaataataaatagttcttagggtcttcttgcttgacatcggtttacgtgagaatttctacaatatctgttaggccttgtttagtttcgaaatttttttggttttcggaactgtagcattttcgtttttatttgataaatattatccaatcatagaataactaggcttaaaagatttatctcgtgatttacagataaactgtgtaattagtttttattcatctgtatttagtgcttcatgcatgtgccgcaagatttgatgtgatggagaatcttgaaaaaattttggtttttgggtgaagtaaataaggccttaatctgggacaaaggaatagttaaattggaacagacggagtgtgtttgactaaatctatttgaaaaaaatatggatatttatatatccaataattctctagattaaatatattatatatttttatagtactcttattataagatataaatatttataaatctagttaaatttaatattgtttttgacttatcgaaacgtgagattctgaaacggcagaactctccccgggcgctccaaccggagaagccgacgcccgcgacaacctctcccgtgctgccacgtgtccgctgtaacatctcgaacggtcaattatccctccactacccaccacaccctgccccccacgctcaccctccgcaccggatcccgtcaccatctccacagcggcgcgccggcccggcacccatctcgccgccgacgcgccgcgccccagcgccccagaacgagccgccggggccgatctccctgccctctgatgagccgccctaacgcccgcggcgagcccaaggtacaaaccctagctctcgctcctccctccccagccgcccccgccaagatgggcgcccatcggcgacaacccagctcccgccgccgccttgtcggcgccctctcactcctcgccgcgtccgcgctggcccttctcctcctagcatcccgcccggtgcccccgacctacggcgtcatcatcgacgccggcagcacggggagccgcgtccacgtcatcgcctaccgcgccacggcggggctcccgcagctggactgggcacgcacggcctcgatgaaggcgaccccggggctatcgtccttcgcggcggacccacgcggcgcggggctgtctctggcgccgctagtagagtttgcccggcgacgtgtgccgcgggagagctgggggcaaaccgaggtgcggctcatggccactgccgggctgcgtctgcttgattccgcagtggccgagtccgtccttcagtcttgcagggaagtgcttcggggctcgggcttccaatttcaggacgaatgggccaccgtgatctcaggcatgtaacatagtaaaactgtgcgacttctttctcattttgatgacttgttctggaaatgtgtggatctggagctcttgcatttgatgtgaagctggaagtacatattttgaaattgggagcttacacttcagtacaactggatggagttctgttgaattttggcagttttttttttttggggtgtatcttagcatgcttgattgaactgaattcaatgtcttcgttaagatgatcatgcaagtatattgaaatactgtgtaggggctgaggaagggatatacgcatgggttgcagcaaattatgctttggggactcttggcagtgatccaaaagacaccactgggattattgaacttggtggggcttctgttcaggttctgtgtcttgcatcacactaaggaatcaatcctccttcagcaaaacttgttgggtacttactattttgctttttttttatcaaacaggtgacacttgttaccagtgaacctgtgcctccggagttctctcatgtgctcaagtttggtgatgtctcatataacctgtacagccacagctttttgcagcttggtctggtgagttgtattcgtaaatattagttgtacactcaacacagacatttccattgtcaacgttctaataaattgcctctcacaagaaagtatgttgccacacctgcaccttagcaatgatccactttatggctaattaagtgatcgttgctattattctgtatgtgctgactgttctgtctcattttgtgcgcagaatgtagcatatgaatcattccatgacttgctcagctcacctggccttagcttaagtaagtcaattggttcattgcatttctagtttctaaagtaagataatcagatatcacaagaacacatctatgacttaaaattgattacactggggggacaattttagtacagttgtgccaattcttttttcttgtattcaacttctgtggatatgttatgttctttttgatactatatatattaggcctaaagctaacataactccagcatatttcatgagtctgtctgatctgactatgcttatgcagtggccacacatttgatttctcaagctaagtacaaagatccttgcactccaaggggatttacacacatagcaggatcagttaaacttcctgttagtgttcttgagccgaaggttgagtacagaccgtttgctcatgctgtggggaacttttctgagtgtagatctgcagcgttaacactactgcaaaaaggaaagggtagccaactgcacttatacctcagtgtcttatcattatgtttatttttcttcagaaatgcttccttttcttcgatagtcatatctgtttgccgaatgctgggggaaagtatgggactaggtccactaagagctaatccctcaattccaaattgtaagttgggtcctggcttatctagatacatagcttttgctatgcaccaagatatatattatgtctagatacatagtaagtctatgtgagtatgtatatctaaaaaagccagaacggcttcaatttggaatggagggagagggagtaatttgcataggcctttgttatacaaaattctggttcattaggctattccacctcctgatcaggttatcttaaagaggttacaaatatttatccaggttagctcaactcccccaacctgcaagccatttggtaaactaagcctgaatccctagtacttcccttatgtgctgagacaaggagtaagatatacacttctatatcatctatctaaaataagaagagttttttttccatgctttagcatattgttgtatgaaatgaagtgaaggtgcctctgatgacctacatctagtaacatgttttttaggctcgtcaatcaaaatcaaattattgatatctttcactgaaagcatgcttgatgagtaattaattcatttgctaactttgataaaatagtttgagaaattccatgtttattttaatctgttgaatgactgcagcttttgttaatatattaaacagttgaatgactacagtttttggtgcagtttctcattctctgtttatttcatggcataattgaggtgagtgtgttctttttgcagagggatgtacatatcatgaatgtcgccttggagcagcatttgtacctgagttggaagggaaatttttagcgacagaaaatttttaccatacttcaaaggtctatataattctttctctatggttgggggctcaaaaagttaaatttggacatagtgcatgcattatgacatgagtcttctctttgggttaagattttccattttattttatgttcagtattcttccatctttagtacaatattcatttttatattttatcgcttaacagttctttggtctgcactcaaagtccttcctttctgatctgatggcggctggagagaaattttgccatggggactggtcaaagattaagaagaagtacagctcttttgatgacggacagctgcttcttttttgcttttcctcagcatatattattgctctgctacatgatacacttaaaatgccactggatcataagaggtgaacccttttctacagttctattctttgtttgaaaacctggatatttacatgagttttgtttcaggattgatgttgtaaatcaaatccatggcgtgcctgttgactgggcattgggtgctttcattgtgcagacgacgatgaaccgaacagagtactcagattcatcagtttcatatctaaacaaccactcttctggcttggttccgcttctgttcattactgtggttgtatttacagcattctccatcctaaggtggagaaggcctcggctgaggacgatctacgacatggagaaaggcaggtacatcataacaagggtcagccgatgagtcgcacacatcagcgttgggagtgggtggacttcctgcagcggagcactattgaccatgtatgtagattttcctaaattgatttcttactcagtggccagcagccacactccagcatgttgccttgcggaattaacttgctgagtttgagcagcaacccctgtatatgatagaaggatgtgggttgcggtggcatttgtgcatgttcaatgctgtatgtaatgttgatgtaattacagttttgtgtctaatgatcaatagaagttctctgccatggatcatggatggcagagcagctgtatctttgtttcctgtcaaaccactgatgttatgtaatcctaagtctaatggtcgcgtatattatcttgccttaaacacctctgatgctatcacataggcacatgtgatatcgttgcactcatgttcctggcatgagtaaactatgaagctgaccatctgaatgaacttgtagtaaatattgatagtatattttgtttttttttttaaaaaaaaaacttgatcgtggagaagtacatagaactattccgattgcgtccgatgatgggctgatgcgtcc

SEQ ID NO: 4804 - DNA, 3865 bp, Sorghum bicolor
caacatgcatggacatatgttccaatggccaatgcaagaagcagcaaccccaggacaggatttggaagctcgcttgagtttgaagggtttgacgttgacccgaatctgcaatccgatgacatggagggagacatcacgcgctccaaatcgagatggagtttgccctcccaaagcaaggggattaatggtgttgccgggaattgtggggacaccggaatggaacaaaacttttggcgggtattttgactcgcccgcgcgcacgggcgaaaccttgtccttcagcgattggaggcggcaagaactctcaccgcgtgcagaattttcgcgtcattgcctattgtgatttaaaagcgtttgatcgatcttggacgctcttgtttgtgcggttttgctagctaacacaaagataaatcgtgcaggttatactaaacttttcgctttcagtttttgaatgagtttacacattctgttttcagttgtttcctagacggtaaatgttaaatagacatccgcctactatttagctattatattattcaagcaagacaaccatttaaacaggcgagatggcagtctaaaaccttgtttgaatgttgtcggatttatatctcaattcatatgggttagtgtgaaacttagctaaagtgtactctaatccactcaacatatgcagattgatgtgaatctaattacatccaaacaaggcctagcctaaatgttaaattgcaagggtttctgtactttttctacaatttttagaagcaaactacgcacgggataaaatttgaaagacattgggtgtttacattgtgtgaactacatgatcaggattggctcacctattcagcatagctatccagttcaacatgaaagtcctgtacctgcagtattttaaaaaacggaaccttatggactatggaatgagcagccattggaaggaggaccagcaatccagcatgcggttaagcaagctgactgttgaagcaaattggaccagatttccaccgtggcaactcaccttcaataaaatttagtgtaacaatctgtgcttagaataagaaggttctcccttccaacacttcgcagtacgtggcacacacgctagctagtcaataaacatatggagaaagttacacaggtcaggccgtcactgtctgtaggtaacagaaaacaatttctgaagagaaacaacaagtagtatgattctatgaaactctctctctctctctctctctgtgtgtgtgtgtgtgtgtgtgtgtgtgtgtgtgtattaggattatgtcaaatccaattcaaaatgcattcagtgggcacaaattattttagaatcccaaagcacaaactgacaaaagtgatgcatatatagagctgtatgggaagggatttttggatccagatactggaggaataaatcttgaagttcatgcagataaaagcactagtacttgagaagagtttcatactcctgcctggccccgtcgaaaatttgaatgccaacaaaaaaactacggtgtagtttcagttgtttttgtttacctggggaggctcaaactggtagatgaagcactgttgcttagtttaaggattgttttgactgccgtacttgggtattctaatgtgtgaaccgaaagggacggaggcagtcttatttctgctagattgtctttattgagtcactaatccgccattaaataaatataccatgacagcttcaaatagagaaggaagtagatacaattatttaatcttcagagtggtggtcctcatctagtcattccaagcagctctggccttggtatatatacacatggtgtgtaatagatttgcaagtgcaatagtatacagctctcttggctcttgtcttcacctcagcagcttcatccctgaaagccattcacaagatactactacacatataagtaatacacagcagactttgtaagtttgtaaccagcagcaagcaaggcttcaagcttcatcgctttagtagtttgtaagatatggaggagaggaatgacatcaacatggagaagtcagatgagatactcatgccgggtttccggttccatcccaccgacgaagagctggttagtttctacctcaagaggaagatccagcaaaagcctatctccattgagcttatcaggcagctggacatctacaagtttgacccatgggatctcccaagtaagaagacacctccttcttcagaacttctactacttagacctttctgtggatgaatgtcttggagttctatgaaatctaaacattttcattgttcttgttcatctacagagcttgcgagcaccggtgagaaggagtggtacttctactgcccaagggatcggaaataccgcaacagtgtaaggccgaacagagtcacggcagccggtttctggaaggccacagggacagacaggccaatctactcatctgagggcaccaagtgcataggcctgaagaagtcccttgtgttctacaaagggagagctgcaagagggatgaaaactgactggatgatgcatgagtttaggctcccttcgctcaccgatccctcgctccccaagcgcccgatcgacaagaccattccactcaatgtaagtattggcaatccatattgcacagttcaagagctaaattcaaatgttattttggcaagttctgaatgaagtccttttctgcgccacaaacaacaggactcctggactatctgtaggatcttcaagaaaaccagttccatggcgcaacgagcgctgtcccatacctgggggcctccactgcctggggcaacagaggcagacatgttcaccgcgttgcagtcagtgcaagcttcagaatttgctcttgagagctcactgcaagttgcaccgcttgcacctgcaggccagttcaccagcaggcatggtcagcaccaccaccagcagaagggtaacaacaacccatctctggacggctcctcatgcaagctcatcaacttcaacaacagcagcccatccgaggaacaccataacttcccaatcaccttccctttcgaagtgcaagaggcaccgcagaaggctgcagctgcggcggcgccaatcttcttcggcgcgcatcctgctcatcacctcagtggattcgtggtcgattcttctgccgatgtcaatggcggcggcatcggtggcaggagtcaggactcctcgtccaccaggaagcctagcaatggcttcagcactaacagcagtgactggggggaaactgcagggagaatcaacttcccttttgatctgggtgcagattcttcagaggagtggagatgcaacataccctgggagtccttcctgactagcccagctgctctccagactgagctgccacactagggcagccgcagttagcaattgcattgcacatttgcactacggggagtgtgaggtactatctcataggttacatgtacagactacagctgctgtgagtgtgtgagtttccttcatctgttagcatttctgttagccgcagagacatatatttttgttcagttttggttaggaagtgccatgtatatactacgagctatagcattgttaacagcaaagctaacagagagaaggaaatcttgtgttgtacatacactattgagttcttcagtgtcatatcataagataaatattgcactttcagtgcgaaaatgctgcaagtttgaatacttcattacatcaacataccaatacctatcatcgtctacggtggtcttacgctacgtaccctatgaaaatgtgagttcgtccaggctgagctgccacactggggcagtttgcattaaactacagtacacagagagggagagatacttcgctggactggcatctcccattaaact

SEQ ID NO: 4805 - DNA, 6909 bp, Sorghum bicolor
gacctacacgattttctaggcaacctagacttaggatggcaaaggatctggtaagacgtgggtggagtaaatacatatccatagcttattgcctaacatgtgaaattccatatctgtatctattgataacatttgtttctaaaaaaaatccataggtaacatttcacactcatagtcacatacatggtttatgatgcctgtgtacccgcatccatgagttagattgtcactataatagatggagttatttatattttaagtactatgttggcagaatcatactcgtactataaaaaaatgtttagcctaagcctagcctaatccaatgtatttacttctattattttgatgctaaaaactagtgagaggccgtccgacatagcctataggacagctaggggtttgatttttttaccagaaacaaaccatcatttacggctaggctcaaaatatgctcatatctaaagtataatttagatgcaatgttatttatttgtcacatcgatctagtgtctttgaggatagtagaaaagcacctacacccacaagttcaacatcaatatcgatctctttgaacatgtcaattgaacaaatacgccaaggcttaatggcatagctaaaatccatgctacacatcacaacacaaaagtctctgcgatgatacggccaaactggtccgagctctctactttccttgtttattttattctcttctccatcagataaaacgtgccaaaggtaatgtgctccaacaataccttttcttagttgaagcacacttcagcctcaacaaagtcgctctcacatgctacaagaccatcgatgggtggccatggtgtttgggagttatttgggatgagctcagtagtacgagaccggtcaagacataagtgtgatcctatattcatagttgtgtaacaagtactacaaggattgcctgtgccattattccaaaaatttgaaacagatagagtctctaaataaacatatatagacaaaggcgaatatatagacaaatgacaacatgagtaacattgaaaaggaaaaaaaaaagatggtggtagaaaaccatctcttggcatgattgtaaagacgtactaaaacagtcaacggtttgtatgctcgcttacaagaaaaaaaatgtcaaagctgtttatataaactctaaggaggtgtttggtggtggatgacctaaagttcaatagatactgtaacacatttataactatgacaattagtgttcaattatagattaactagactcaaaaaattcgtttcgcaaataatctttagttgtgtttttagttttgtaaatagtatatatttaatattttatgcatgtgtcaagtattcgatgtgatatgtggtaaaatttacatctcccataaaaaaggatctaagtgacggcacagttacacacgcaggggacaaaccgcttctggaggaggacgacgagcacgtcgcggaggatctaagtaatagtgtatgacacacggcctaggtccacacactacgcagaggaggaggaggacgacgagcacgtcgcggtagtcatctccgaacatactggagcttgttgaagtaaaaccgggacaccttcgccggcagcggcagctggtaccagtagcgtgataggctgcggagccctactcgtccaagtgtgccgcgtcacctctagcgccgctgggaacgccagccacacagcgccgtggtccgcggcggctgcggcagcctactcctacttccaactcccaactcccacagtcccactcccacaccgctcctcgcctcgcctgtcgcctggcagaagaaacagagaagcgtgaagaaaaaacggagggacgcagacgaaaacctcgtccctttccgtcgtcttcctccatcctccctccgtctccttcccttcgttctccccgcctcggtgggtccgctgccccggcccccgccacgcgccgctctcctatttaacccgggcacccgctctccgctccgccactcgcgcacccatcagtcatcacgcccccaaccactccctccctccctccggagcccctcaccgccactagctaccacagcagccgcagcggcggctgtagtactactacctgtaccgtccctcgacttgcaccacacgtccggtgttggtaggcaggccgcaggcaagcgcggcggcggccatggcgctggcggggacgggggtgttcgcggagatcctggacggcgaggtgtacaggtactacgccgacggcgagtggcgcagctccgcctccggcaagtccgtcgccatcgtcaaccccaccacccgcaagacgcagtacagggtgcaaggtgcgcgctctctcgcctctgctccctgttttttttaccggcctccaagaacctcggggagctattcctagtgctgtccccttttttggggaaaaaacagttgatggggacgtacgcacctgtgataccgttgaattctgtcgatgatcacgaagctaaaacttggacgagaagcgccagccattaatggctacctgcgctatcactttccttaattctgctgaccgtccctgatagtgtctcttaactactgccccaaccaaatagtctcactttcgatgcttaattccattgtcccccaattgaaccactagattggcagtctattccaagaatctttctccagttaaccatctctcgaactgatcagagtccataggcttttgctagtgctgataggttcagtgtttgtatgtgaactgcaaaagggggatggcttcatttctgatgacccggatcccctgtgtgttctccagcatgcacccaggaggaggtgaacaaggtgatggacgcggccaaggtcgcgcagaaggcgtgggcccggacaccgctgtggaagcgcgcggagctcctccacaaggcggctgcgatcctgaaggagcacaaggcacccatcgccgagtgccttgtcaaggagatagccaagccggccaaggatgctgtttctgaggtcactagcagatgaagaaattacagttagtgctttgctttgattcttcagttgtgctgcttagcagacaaaatgtcttgttgtgttttcataggttgtgcggtctggggatttgatttcgtatacagctgaggagggtgtgcggatactgggggagggcaagctgcttgtttctgatagcttccctggtaatgagcggaacaagtactgtctcagctccaaggtatagctacattgcagtactcttgtttgctgtatatgctccactgatttgactacgacattgtttgtgcatcttaacttattcagaaatgttgatagaaataagctagttaaacgtttacgaaattaattgatggaccagttcatcctgagtgatggagaatggaatggtaaacgttggggatgggcaattaaagtctaaattcatctctaaaggataggccactaaataggcagcttatcgacatgcagaggagcatggaatattccatgtatgctgttggcatgtcttgctgtttcctttttctttgttttgccttttctttgctgatgccattgccatgttgtgactgctcagattgtgtattttctatgattctatccaagtgtaaactattgctccgtttgtccatcctatttttcatgtgtcaatgattttgtgtcatcgccaaactgaacaagggcgtggatctgcctgacctgactgttcctatgccaaattggctggaattggtcaggtgcaaccatattaccataactcaaagaaagcatagcatttaaccagcgacgttagtgttatgcctcgagctgggattctggtaacttctgaaaaatggttggttgctgctaatttgtaaaatctcatcttggatttaatcattcaatagcatcatattgttttaatttttgcaagccttgcagaagtaaataaaatcatagtctagtacagtaatactaatgcagtcactccactgtgtccaagcagttgagctgttttttcccctcaatgtactatagcaatcattcaggttgttgctttataaatgaaccttttgacctttactttctaaccaactatgctgacccttgtgaccactttacgtcatatgttttgaagttaggttagtcctattgagcagtgctacttgcagatgtcagggaaacattctgttatgtttgttagaatgaaactccaagcaccatacattcagttatgaactcatacaccaaacattcagttatggaatcagaaaccatagaatgttgctgccaaacatgggttcaatgattttaagttgtttaccaaccaatattcatgcatgctgtagcctgtagaaacttgtatttcagacagtttttatggtgctaagttgccattgatgctcccctgaacactgggttccccaaaagtattgacccattaatattgtttccttgcatatctaatgtatcatcctgttcatgcagataccccttggagtagttttggcaatccctccattcaactatcctgtcaacttagcggtttctaagattggcccagcactaattgcgggcaattctcttgtgctcaagcctccaactcaggtatatgagttttttggggttaatctaactcccttcctgagtgtgaatttaatgcctttcaaagtgaaaatgcttatgtgaagtattattgttcaaacagggtgctgtggctgcacttcatatggtacactgcttccacctggctggtttcccgaaaggtttgatcagttgtgtgactgggaagggttctgaaataggagattttcttacaatgcatcctggagtcaactgcataaggtaagcatcaacagcacttgccgacaattgatttcttcagttttagtgagacaaccttatttgttcctttgcttcatagttttactggtggcgatactggtatagccatttcaaagaaggctggaatggtccctcttcagatggagcttgggggcaaagatgcttgcattgtgttggaggatgcagatctagacttggttgcaggaaatatagtaaagggtggtttctcttacaggtgcagtacttaataatgctattgatttgtctggagatagaattttatatcgcacttggatttattggaaacttagaaaagtgaaagcaaaaattggaatcaatgaagacttttagctaacagaacatgacatgtggtatccaagttggtgtcccttacacaatagtgatgtcacatgcttatccttggcttccatgcttctatcttaagttatgacctatgagtaaaagtgcactactgttttttttttcaagaacagtattactattttgaataacatactatcccatctctgatacttgagcttgtactcaaatgtgatgtgatcaatgcagtggccagaggtgcactgctgtcaaagtagtgctaatcatggaatccatcgcagatgccgtagtacagaaggttaacgccaagttggcgaaactgaaagttggcccacctgaggacgactctgatatcaccccggttgtaacagaatcctcagccaacttcatcgagggtctggtgatggatgcaaaggagaaaggagcaaccttctgccaggaatacaggagagaaggcaaccttatatggccattgctgctggatcatgtccgccctgacatgaggatcgcatgggaggaaccttttgggcccgtcttgcctgtgatcaggatcaactcagttgaggagggcatccaccattgcaacgctagcaatttcggcctacaggttttttcctctccctccctgcctgttaaacagcaacgggtgccattatacccatcttcttcagctcactgtttgtgcaacgcccatttcagggatgcattttcacaagagacatcaacaaggcaatcctgatcagtgacgcaatggagactggaactgtgcagatcaactctgcaccagcccgcggacctgaccatttccccttccaggtaactgttacatcatgtcagtgattttctgtgtcaactggttatcaagttgctgagaaatttcattgaggtgttactaatccttagtgcgtgtgtgcatgttcttttttttgtattttagggtctgaaagacagtggcattggatcccaggggataacaaacagcattaacatgatgaccaaggtgaagagcactgtcataaacctgccgtcaccatcctacaccatgggctgagatgttcatgtaacgggtgttttatatccccatgagcaatgtagagaattaaaatgtttcatagccacgtgagatttgtatgctatttacacctcagctctgcctgtaccagatcttttgcagtatataaagaataaagtgcgttgaaagtattagtataaagaataaagtgcgttgaaagtattgagtcgatgcttttatctcgacatactggttttttgaaaatgtgatcacacgtaccatgcagaaacaaccataaataataataaaataacaaaggagagaaaaaggaaccacaacagtaggcagaataatactaaagttaatacaataacagaatgcatgctcattaaatctgtactttacatgatagagcacagggagaaaaaattaccaaaggcagtgtgtattcctaatctcatctagaaagagatttgcttggacttactacaaaatcacgacagacaaatgcatgggaaattgcaggtaacctgttgtacagtcagaacgatctttcctaaaacaaaatcagcaggacaatctttgattgcttcattcaatagatcaaggcaacaaagtgaggttcagactgctgagggattcaaaccaaaacatcagtttcagaacacatgcatgaaaatcaagaaataagatatggaaggtgatagagctaagaagccacaaattgcaa

SEQ ID NO: 4806 - DNA, 5323 bp, Sorghum bicolor
aagccagccgcttcggcagcggcgccgcccgtgcggcggtcgtaaaaaatggcgtcgggcggcgtcagtttgggccgttttcgtggggatccgcggtcgcgaaaacgatttgtgccggaagtgagcccatggccgtatgtgcaacggtggccttctgttctgtgtcatgcggtccgtgggccccgcagctggattgcaggccttggcaggcaagcggccaggtgcgatggcgctgctgaagttgggctaggatttggctgaatacaaatcggatggctcctgcaggtctacatcgccggatggactggcgggccgagaatagtaacagatgggtctggttgccggcggtcgagaggccaccacagcccatcagagtccagagggaaacatgggctgtgaatcttgggccttgtttacttccacataaaacccaaaatttttcaaaattccccgccacatcgaatgtttagacgtatgcatagagtattaaatatagatgaaaataaatactaattacacagtttggtcgaaattgacaagacgaatattttgagccagttagtccatagttggacaataattaccacaaacaaacgaaagtgttacagtgtaacgaaatgttttcgttgaggaactgaacacagccttgcttctcgcatcacttgttggcttaggccttgtttagttccaaaatattttacaaaatatgaatagtactaatttcgtttatatttgacaaatattgtttaatcatagactaactaggctcaaaagattcgtatcgtcaattccgaccaaactatgtaattagtttttattttcgtctatatttaatacttcatgcatacgtctaaagattcgatgtgacaaggaatctgaaaaaattttgcaaaattttttggaaattaaacaaggccttatgtaacttctgaaaatttttactctctttttttccacgtactccctacctccacgaataaatgcagatatcatttctcgagaagttaaattttttaaaatttaactagaaatatatcaaataatattaatatttatatctacaaataaatatattgtgaaagtatattttatgcttaatgcctcaatctaataatacatattacatacgataaatattagtatatttttatagatatttgatcaaactaaaaaaatatttgattcctaaaaaacgagatgtacatttatttatggatagaaggagtagcctgaaactgaaaggttttgacttctccgtgagcattaaattcaaaagctcacaaacttttcttctcttcatccatccattcatggtcagtgttgctgctctcaagctgatggacattcgggtatcgtcaacttttgccgactgcttattgagccaacggcagtattatttatttactagttagtcaacgattgtaggggtcttgactttcttcactcctttgaatatttttagagaaatagtgtacagtttgcagcacgtgtggcaattcctggctttaatttcctaaagagatcaggatgcatgctcggatgatctggggcggtgggtgaagctcatgccactatatatatacgccatgaaacgtggcacgttaattcttctatttcagtaagtaatcatgatttatccaaaattaggttaagtgacatacttttcagtagtttagtgtcatggtagagggtgacaagaacgtcaccttgcaggaattcatccctgatccatccattgatgcatgcatcatccatccgcacaaaaaagctttacccatcatttagagagagcaaaggcattcattcccttttttgttacgacgaagatggccgtcaagagaagaaaaaaaaaacatacgctcgcggccacatttgtcagtgtcacgagctgatcggatatttggacgccacacctgttcaatcagtattcacatccatttgagttgaccttgcgctgcgccaactggcaaacgggtgtctgacttctctcacattatctcattttcaacgctagctaattgaggaatatgatcgatgaaatcacccgtccatacatacccacatcttccctctctttgaccatctgccctcccagagcgtgcgttcttttcggcgctgataagtagccagcctagtagtacatctgaaccgcctccctctatcctctcttcctctcatccccctctccttctcaattccgaactccgaagaaaaacagcaacagcaatggcggtgcgcgccattcacacgccgccgctgctcctctgcaccgtggcgttgctgctgctgaccggcggcctcgtgtcgccgtccaccgccgagctcagcctcgacacggtgagggacttcctgacgcgggaggaggacaccattgtgttcagcctcatcgagaggaccaagtacccgctcaaccggccggcctacgagcccctccacttcggcgacggcgccgcgcaccgcctcaacgcctctttcgccgagctcttcatccgcgagtccgaggccgttcagtccaaggtactacaattcagacgacgaattcctctcccagctcgtgttgtttttttcagcttcggaagtggtagaattcagcattctttttcggcgttgattagttgctcgccggctttgtcagcatctgcatgtggcgcgtggccggcgatccattaacctatgattttgattaatctgaacctgtttaagatgcgctgactttgggcgtatgaaaatcctggtcaagcgttacagtttgtgggggaggtgttggctgatgctaattattaattcgtttgctttcaataactttctgaacaatctttgatgtgggaagaaagtggcaggccggcaccggcagtacgtctattttaaaaatagcaaacggccagccattttcttcgtttactgattggattggaaaatttgaaagattatattattaaacctctaatcagaaatacaataagtcaaattttggattatttgttgttggcctatttttagctttggctatctgtagctaaatgtttacacagattggcaataagattggtgctacatgatccatcatgaaaaatactttcatgatatatatatcccattcgatttaaaataagaattgaaccatcaatagttcaaaattcatatacattgataatgtaaggtgatgttttcagcatcattgataatttcacatatataattcattatgaatgtactttcatgacatgtaaatatgggatttgctaaatttcaggtgcttgaatttcagttttccttcagacgatggttattgcatatattttatactaaaattgcagttttagtgcgttacactttctgtaaacacaatttgtaatttttggttccagaataaaaaaaaccagccagacaaaaccacaaacctgacaaaatcttatatgtgttggcacaaagacaatttaaaaattgacgattattttctatagttagacaaggacaaaaatttgatatgttatgacacaaagataaataacagatcacaaaaagtaacaatttacttgtactaattatagtacaagagtgttgctgaaatcatcttaaaattcaggcacctaaaatataggaaaagtgtataaatatctatttgaaataatgtatttctataggcaaaagtatatttgcagaagaagtagttttttgcattgggatttggatgcagaccactgtgttataaaaagcatgcattaattcctaacggcaagctatctctgcactgctactgccattggcatcaagcaacacaatttgcgtgaattgtgaccaaagataagaagtgagtgctaatcctgagttgctgctctactttttccataggccggaaggtaccaaagcctacaggagattccattcttcgcttacagagttcctttcactctggcacctccatacaacttcacaagagtaagcatccagccagcagccattgctgaaaagataatgcgccatgaacaactatctctgaaacgatatatcactgaacaccggagcttaattgatgctataattgcaggatctgtatcccgctgccgcattacttaacgttaatgacgccatatggagcatgtacttcaatgagctgctccctctgctggccaagaacggtgatgatggcaactatgccgtaactgttgatgcagatcttgcatgtcttcaggtacattaacaatgtcacactgcatactcccgaatgtatagttcgttagaagtcaagaatgaacactgagaatgtctccctttcacaggtgctttcaagaaggatcaactatggtaggtacgtggcagaagtgaagttcagaggagaccagcagacctataccagcttaattcaggctaaggtattcaaaattcccaatgttcacagagcatcaggtgatcagttggagatttgaaagtttaagatatataaataattggtgtttcccttttgcaggatagagatgctctgatgaagctactgacatctgaagcccaagaagacgtggtaaagagaagggtagagaagaaggcagttgtatttgggcaaaccataacattagatggaccaatccaaactgatgtcaaccatagcagccaggctaacttcaaagttgatccttcagttgtttataaactgtatgatcagtgggtgattccgttgactaaacaagtggaggtcgagtaccttctccatcgtctcgattgattgaataaaatgtgtatccagctaacctattatttgtatacaattgtaatcaacacattgacaacatacatacgcaataagaaacatgcagaaagttcaaacattgttatcctcggtttcctacgatcatttgtaacacaatatcgattatcatcaatgattaattggacacaaattttatccataagaatgcaaaagaacatcaaagggtaaaaacagcggtaaaacatgatatcagatatccacaaacagaactgaagaaacacaggcattggatttccccaagaggcagtgcctactttgctaagtgacgaccgatcgccaatggccaattggccatataagctgctttccatgtgaaccactaagtgttaatatgcaaggccaagtatacaaagtacacagaccatacattgtagtattgtactcagccacaaaaaagtcaaattcctgcaatcgcaaaatgccaggagatgagcaaggctggaagaaatgaaatgcactttcagttccttacacacgtctctcaaattgtaatatcatctttagcaactatgtctgcaactgcatcttagttttatgcactacgcgttacctgctatt

SEQ ID NO: 4807 - DNA, 4112 bp, Sorghum bicolor
gcagattttgaaagtttataaaaatgaactttctgtacccatgctatctaagaggattcagaactgcattattttttgcctaaagtttacgcaacctgatcacttttcaatgttgccaagctctggtgtggcaagttagtcgataccagtgtgatggtgatggcgttaggaaaaactgccatgtttcctagtcaagtagtcaaccacatttggcagtgctgttccagcccttaaaagtgcagctgtttttaaagagtgctttattgaaacaagttcttagaagtatagtgttgttcgtaggttggaaagtgtaaatgtagttttgtggaatcccttttgaaattggcattcatcttctctatgttctgtgattcttgccttttcttgtaaatagatacagacttaaccttttttatgcaggaagtaaatgcaactctgccactcaaacatttgacggtgttgacttaatgggtgaaaggctagcaaatgaggtatatcttttttatttggttaattattttcaagaaagatagatgaatcatagaagttgactgcacgtgcatgtatggctaattaatctaatttgtttctttctacattaaactaaccacatgcatctagggcctgtttggttccccttgctaaattttagctagctaaaattattttagctactcttgggtgactaatggaactaaactattttagctccttttagtcaatgtgtttggaactttagctactaaagtgactaaagtttagctagctaaaatttagcaaggggaaccaaacagggccctattttgtatttgttattgtatacatgccctgttgaaatgaaaaatgtcaattgtgttagtttgtgtcaagttggtggcatctgggcttcttttcatatatggaagtactatatttcagccttattatctggtgttgagacctaactgaattattataggttctatcagttgtagagcaaagacgaggtgtgaagaaaatctcattcgtggcacattctcttggcgggcttgttgccagatatgctataggaaggctctatgaacctaatagtagaagtaaatcttctgggggcagagatgatgttgagcacttggagggtcacattgctggtttagaacctatgaatttcataacatttgcatcaccacatttgggttctagtggaaacaaacaggtaagccagatctcttttgctgtttaatgaaaaagagctatatcagtccgtttattctttcttttgttaactccacatggctatgcactaattgtttaaactttgaagtgattattggcaatgttgttggaatattatgttctagctaatctgtgaaagttagccagccatgcaatttcatagagaactttaattatgatatttctgttaatttcatggacactcatgatatttctgttaatttagttttcctatgcattatgtataatcatgaagtgccttgatttcacttgaagtagagcaagaacattcaaattcttcagtaatgttagtctcatgttcagattcttccaccagctaccttttttatgtggcctgcctttccttgagcgaagagcttcagaaactgcacatttgattgttgggagaactggaaagcatctattccttacagacaatgatgatggtagacgcccactcctccttcgaatggttgatgactctggtgatttacagttcaggttatttagtgtacacttctcctttctatttgaaatgattgataaaatgcctgtatagaaatcaggtacttttattctttgtttaggttgtgtcaagtctaagtacagtatattatcttacgcagatcagctttgcgttctttcaaacggcgcgtagcatatgctaatgccaattttgaccgtatcctttaaaagcttcatttcttgtctgtgtactaattattaaaatgcggagttacacttcttacctctgacatgttatccacttaactaaacaaaaagatatggttggatggagaacatcatcaatccgacgtcagcatgagttgccaaaagtatgtattagcagtacttgcatgtttgtagcttctgctctctatagaaatagagtgaatcatttgtttgtcattgagctgacttgcctttcttcaacacctgtagcatcgtcttcttgttcgtgatgaaaagtatccgcatattgtttatgttgaaaaggaagttacagacaacaatggaacagaagcccatgctgatctttatgatccagaaggtatgctgacttctcatacaatctgtttttttatgagaaatgcacgagccatttgctggaatttgcatcatggatgtgctgtaccttgtagctttggttcacatgtctacctagagaaaaatgaaccatatgtctttcctttccttttttcccccctgtgccaagggaattaagcatgtcttccattagtactgcatcttcaacaccttttcttgcattgtaatgagaggatatctttctgaagtatagttataaaggctgtatttcttgtgatttctccaaccattgcagtcaagtttgctacatggaaggatttatttgtactgttcattaatgattccgatatgtttgtcagtttcctacatactgcatcttaacagaacactataattgttacttcaaattaagctgttagtttatcccaaaccccacaattgattgtttaacaacagctgataaaaatccctcttatatgcagaggagatgataagaggccttacgcaagttccatgggaacgtgttgatgtgagcttccagaaaagcagccaaagattagttgcgcataacacaattcaggtacaattttttaataacttctttctttttcgaacacacaagagaatttctgatcatttcattaaaggagagttacaatcccaacactgtccattcaaactgtatttttttattaaaaaacttgttaaactgtttattggatgtcttcattttctggcatctgaacttcccttgggcagcttggatcaggattgtggtagagtgctctctagtttgtgtattttgtgtgttgcatctagtgtgatattcctagaagactccgagtgcttgcatggaggctattttactcacaatagttcaaatttatccttttatttgatggtgctggtgcttggtatcagcaattttatatcttcagtgacttgtagatacataataaacgaataaattggcgaagtgtgtgttacctcttggttgcagagatgccttttgactattttacaagctcagtacacaatttgttaatatctgtcagtacttcagactttctggcaacaacattagtccattattaagactgcattcggttcatcctgggaagtaatattcttttattttgcttattaattaaagatgcaattgcctgtgcacgctctcgcccaaatcggtcatttcttagcacttatcctcccaagtcccaacattgtgtatgcttggcacatgctcgtcagaataatctgttgttcatccaatgtcaggttaaaagctattggctaaactcggatggagcagacgtgatcaaccacatgatggataatttcatcgtctaatccatggaggcatggagcctacatcgtctattgaaatttattgatcagtgaccattcaattttgccttggccaatttttccttctaggttgcagctctccagttccccatcccaggtaatatggttgattctttaggcccgtttgcagagcagagccccaatgcttctgatcctgcaccatcagcgacgctagctcgttcaactgtatcataatctgccccctcctttgtataattgtattccgcaactaagctagtaaatagatgttgctgcaaatagaattctcctgtttggttcaacactggagttcaacttcaaactgaaacttgtcattcttgtgacccatcgacgtgcttattgggcacagtacggtacttcaatcaagtttttttgggaactttttttttggtaaaatatgaattgtacgtaccatatatggataacaggatcgctcttcaaatgaggttttggtagagctcctgtcctcattcttagagaag

SEQ ID NO: 4808 - DNA, 5748 bp, Sorghum bicolor
aatttaatagatttgagagctctagcagtaccccagtctcacccccaatgagcaattttttctcggccgcttaaaatctagccatcgacccctcaaagatgagggacctagactggctccccaatacgcgcggtagcatgcacctggcgtcttccaagtgatcagtggtctcagagtcttctccattgtcggcacgacgagcagtgccaagcgtagatcagccatatggggctcgacgatgtgtccaacaaacgaggcaacaacagtggaggaggaaaggtggccgcggaggtgtaatatgggaggaggaacgtaggaagggagggagtggcgacagaggaggctggcgatggacgaagaggagcgtcggcggaatggaatgtagaggagaatgaacaggcgaggagagaaaaaagaagaaagtgttccataaatgacaaattgactctacatgtcagaggagatattggggtgagattttctcgttccgttggagttgaggcttttaaaacccccaaaataaaagtatagcttcccgaataactagttttgaggttgagatttttcctaccgctgaagatgctcttgctacccatagctaacttgatagatatgccctaccacactttctttctcattcctaagggctccatgctttgttttcgtcataatctttgcctcatctaatctacctcctccacctcctatatccattgtttatccaagtgttcgaccgcttatcgtctttatcgggctacctattcataaacaacttttttaaggttcaagctttggacgacgaaccctctcacttgaaccttttaacctcgttagagtagacaactagagctttaactctttttagtttgcacattacaacgcagacaatcataaagcatacacattcatcccaatggatgcatgcacataaacactgccttgtgagaatatgtgaagactggactgataaattcttaaaataagattggcggtgtctcgctgtcgacgagaatgtcgtctatgattaaaagcacaaagctattgaatcatagaatattcgctttcgtgaggagttaaacgtaggacctcagatgctaaggttcttgtaatatggacccttttgcaacggagcttaaactgctacgcaaatcagacggtcaaagcttaaactagcagcattgatcggacgctcgagaaatttaggccttgtttaggccctgtttagttctcatccaaaattttttcatcaatcccatcgaatctttggacacatacatggaacattaaatatacataaaaaataaactaattacacagtttggttgaaaatcacgagacgaatcttttaagcctagttactctatgattagtcttaagtgctacagccacatgtgctaatgatagattaattatgcttattagatttgtcttgtagtttcctgacgagctatgtaatttgtttttttattagtttttaaaaactcctctcgacatccttgcgacacattcgatgtgacacccaaaaaattttcatctctaatctaaacagggtcttagttcaccccaaaaccaaaaactttttaagattctccatcgtattgaattttgcggcacatacatggagcattaaatatagatgaaaacaaaaactaattgcataatttatctgtaaatcgcgagatgatcttttaagcctagttacttcatgatgtttgacaaataaaaacaaaaatgttacagtgttaaaaatctaaataaaagcgtcggttgctatttttcgcagacaagggcagatgcagatagctagaaatggagctgatcaggcacacagaagttgtcggttggtcacttgctccttttttttttccctcgccgatagaaggctgtcttctaaccgaaaatagtcggcaggggcactttggtcaatccacgccaacggcaatcgcacggccgacacacatgacacatgcggcgagagagcagcggagcaggtgcgcacgaaaaaagccataaaagagagcgagctcgcagcgcagatcgaacgggagaagagaacaagagatacctctgctcgccagctcaccctgctccagttctccttccactcccacactcccagccgagctcgcgcgcacgcacaggcacagcacacacgcgcaagcaggagctcctgctagatcccaaactgtcctctgcccgcccgcgcgcgttgcggggggcgcaagcaaaggatcatcggatggcgacgatgttcgcgcggccggtgctggccgccctgctgctgccggcgttcctgctctccgccgccggggccgccgacagcaagggtactgctcctgttacctttttcccgcttccgttcctggttgctgtcgcctgctgcattcctcgtgttcgttcttgcgcacgctctccgttgatccaatctgtcttaggcctggcgtcgtctgtttgctggactagtgcctggatctgggcgttttggatgcgtagctcgggttgggatctcgcgggcgcggtgggttgacgggggagacggcgggttctaggccattggggatcgaacaattcggtaatggggatctctgttgtggtagtgttcgctgggctatggtttcttgtcctagcagtaaagatggtgctgactgctgagccatgaataattgacaagtaacttccctcagtccctgaccaaacgagcacaatcttgggggaacttcagtgtaattatcacttctggttctgctgtgtgtatggaaactactgaaatggtctgcttcaattgtgaaaattggcgtataaattttatgaaggctgaggaacggggctttagattagctgcatacgtaggccaaattataaggacttccagaaaggggttgatcaggtctccaatttatatctcgggtcttcaagtaactagtgtgtgtgtgtgtgtgtgagccagtgacgtcgctgctcatctatgtgactagtgtttgggagatctaaatgtggaaattttggttcattgctttggtagcataatctaaattgtcgacttatgttgcagacgtggagcatttaaataaattgttctttttgttatgcaatagaaataaattatttaatattacgtggaaggtatcagctgtacatatgacatatctttctaagtaatatgacaaatgagataggatattagccatgggggaggtttgagcaacatcaccaatatattatcaatgttgactcttgaaaaacagagatgtccacagtttctcttcaaaaaaaaaaaaacagagatgtgttgtggtgcttgaagagaatcccaggtaccatccctctaaaatgttagtttaaatcaaacgataaaaaaaggaaagactgaagtcgtggcctggtatcactgaatggtggactaggtagcaatttagaagtcaaggtggaaggacgtaaaatcatttattggctcaatgaaactatattggaaggtattttgtacttttcttgagttctgttttcctcttagaaatttaacagggcattaaataaaaacaaattgaataaggcaagcagctctgccagtgccgttcgagaggacctattatgctgtcagattggttgccacatgtcgtcaatagacaatagccaccgtgtgaaggtaatggactcgtctcaagtggtgacaattttggtagtgaggagcagccaagtgagatggaaagagatgccaatgtggctcctgacttgaggacacacatggaggcgatgactggcaataacaatgatggaggcaggattggggaaatacgctagcggcattagtatcttcaagtgtttcacgacggaaggggctcaggatttgggagttactgaggattcatagtgccctaatgagcgtgtacagattactgatctatcctcaattacaatatttatgcttcctatctacccttgttaatatcaatgttcacacattatatggtaggtacctagggttcctttcacacactgtaacaattatctaaaaataatgtacggttttgttgcaagcaacattttttttgatgaaatagttagcatcattttcatgactaattttatactattcttgtaacttagctttttctaaggaatgaagtttcagtgggaccgtggcctactttgttaatttcttgttatccatgggatgttctcagtattgatagcagctatttgttcaagtacaatctaatagactgctacataaggtctgttaggatgccaatctcctgaagacctaatatatattagtactcctaactaagcttaaatatcaactgtatttgttgatttctacattcttgtgatttcagcatttatctaggatgcatttgcatcttcacttcctcctgaaccttgaaatctgtattaatttttgtacaacatgttgcttgaattatctcctttttcagacaaccctgccgatcagctcgttgcattgatcaacagcaaccgtactgccagcaaggcttctgctgtttctgataatcaaggtttaggatgcattgctctgcagtacatcagagcatatgaaggtcattgtgaccaggtggatgacaagaagccgatggagtcaagtttcaccgacacatttgccccaacctgtggcgtccaagccacaactctttccaagattactggtaggcttgtgggctgccagtccaagtatgcgactccagctgaggcctttaacatcctggtgaatgatgcgaagggccttcaaatattgcacagcaagaaccacacagaggttggggcagctgtgagtggcaccgatggtggtggaccttacttctggtgtgtcctgttcagtgacgggaagcctactaccagcttcaaggtggatggcgaagtgcccaaggcggccatccatccagggtgcttcagtggcaacaatgacgactgcatgggcgcgacgaatggcgccatttcgaccaatgctggtgcatcgaggctggtggcggcccttccttttgctgtagcttgtgcctttgctttgtgagcttgtaagtaggtgtgatgttttcggccattattttgctttgtgaaaaggagctgaacaccgtctcctgtttgcagtggcacgccattcttttgcttctctgagcatatgaactatacatgcaaggatttatagatcagtattcaacatttcagactatcatttatagatcattgttcagcatttgagactatcatttatagatcattgttcagcattttagactatctgttacctgttcagagtgttcatcatagtaactttgtgcttgtgcattcttttagcacgtttgctatgactataagagctatttgagcaaagctgattgttcgtagcatgcgatttctgatgccagatgctctgtttttgcattgcatacctcccaaacaactagtttagaaggtgtttggtattcctgtttgttgtttagaaacatttggtggaaaaatatctaactggaggctaaatggtctaccaacctatttagggggtgtttgtttgagggtgggtgtttttaacaggtaccttaacatttttgttttatttgacaattagtgtccaatcatggactgattagacttaaaatattcgttatttttgttttatttgacaattagtgtccaatcatggactgattagacttaaaagattcgtcttgcaaattactctttaactgtgcttttagttttgtagatagtttatatttagtactctatgcacat

SEQ ID NO: 4809 - DNA, 4428 bp, Sorghum bicolor
ctgtccgcccccgatgtcgtcggccctctgagaaaacggacgacccccacctgtcacccgacgacggcacgtacgtacgctaacgctgccacgcccacgctcctggggctgggcgcgcgcgcgcacgtagcacaaatggctggttggtggctggctggtgaggcaggcaccgtccgcccggccgtgctctccgtgcactcactctagtgagcaagaggccaagagcaaggtcagccgctcgggtcagctgcccaaccttgcgtgccaccgctgaactctcaacgcccgccaccagagcagagctggatccttcagaatctcggatgggatcggtggtccggctttcaccgccgcaccgtgaaaaagtacggcggcgcaatcactgcggtaggctagctaagctgcactgcaggccaggtaagcgcggcgcgaacttcagcgtgacgcagttattactagaccccccacgttggcatggcatccacctcgagatgcccgtacctactgcgactctctctgctactgctctactggtgcctgtctagctagtagtgtctactgggcgtgggcgtggccaccgcgggggatcaggatgatggatcgtggtcgtggcgggatggatttatttccctcccacctcgcctctgctattaaaacgccaccccacctccgcacccgccatttttaatacctcgcgcgctgctcgctgccgccctgccgtgccgtgctgtctccgctctagctcagtgcagtgctgcggccggctgctgtcgtcgtctccggggcacggagagagatgcgggttggcgatggtggtgagattggggcggggctccgcggcggcgggggagcggtggtgaggaggaggaggaggaggaggtgcggggccgtggtggaggacggggaggcgagcgggtggtcggcgagctcgaccagccgcgggagcagcgcgcgcggatcctccggcggcgactcggtcagcccgtcgtgtcctctctcttttccctgcgactgcttgtgcttggtttcttttgctcgcgttcgttgccgttactcccgttgccgtgcacggcaccgcagtccacacctccactaccataccatcaatggtggtgcaagtgccaaacttttgatggagacgcggaggcagacgcgcttggttttggttgattgtttcccccttcccttgagcatttcttgataaaagatagcttaggacgaaccaggcgtgagtcgcgtgaccactgatcagatagcagaaacgcatcattttttttttctctagctcgtctccccctgaaatgcgagatatatggggatcgattttgggtgattactgattagcgatgaactgatgacactactgtatgttgatgcatgtgaagtggtgccacacggatctagctagtcaacgaaaccgtacgcctagatgccagtgctagggacaagaagcaatcaagcaacagagttaagataagatactgtccacctatagactttgtatacgtagaatatacaacacgcacggtctctgtctctctcgtaaggccttatgtagaatatacaacacgcacggtctctgcccctcagctggtaaggccttgtttagtccgccaaaaattttttactttaactatcgtagcacttttgtttatatttaataattattatttaattatatactaactaggctcaaaaaaatcatcttacaaattacagataaactgtgcaattagttttttttttatttatatttaatgctcaatgtatagttttcttttttatttatatttaatgctcaaaaattccatatgacatgacgaagaatctttaaaaaaaaaagaacgcctaaaccccatcgccataaacaaacatatgggtaaaccctggcattatgggagggtccttgattttcgcttttctttttgatcgatcgcctgtttgcatgtgcagcttctttggaatggtaaggttgtgttactttttttttatctgaaagagaactgtcggtgcagcctttaaccaggttcgtgcgccggggtggtcgactggggacggatccggagcgggacgagacgacgctcacttcctcatcctcctacggtgagcactgagcggagcaccatgtggtcaacaaaaagctcactgcttgcacagttgtactcttacactgcttcattgtcttgcctgtacaccactgttgctgcttctttgttgctcgttaatgcacggcttcgcagccattaaacctgatggactttgcgcctcctgaagcttctgcaggttccacggagccacaggaggaggacgacgatgccgcattagaagcggccaaggacaagaggtgggcacatgcacgagcacgaccccaagggcagcagaccaagaatgcagcagtcccctgtttcactggcggtaatacatactaccatgattattgttcttttacctgcccattgcccactggtaggtagctgatcatgagccttaatctgctatgcccacaacctgtttgacagaacgccaagaccagcaacggcatcggttgggagctgttcttttccaaggcagcaggaaggacagggcgcatcagcgcccggcctcgcttgattttggctcccctggtgttgccagatcatcaacgcattctccagggttcccggtcactggtgtggtcggggtgatgaacaaggggttgggcatatcaaattcatcacacggtaggccagacgtgatgtctagtccagggacaccgagctacaatcggcgtgggatgacgacaggtgttggctatcagcagggttcgaattctgaaagagcgatcccgccttcggccggccatagatggcatccgggaagcagcatggtgttgccttatagcagtgggaggacactgccgtcgaaatgggaggatgcagagaggtggatcttcagtcctaaccccaataataatgcacttgggaggtcagtcccgcaactctggcggccgaaatccaaaagtggtcctcttggacctcctggtagatttggtggagcgtactcttgtgtttcatcatcgactcagttccttgacaatggtagagttggaagtctcgctgtgaatgcaccttacttgtctggggtcttgctacctgagcatgcttgtgggggtgttatggactggggaagggatctaagtggagtatcgggtgacgatagcagcaatggccgaggaggcaggtctgctcaaatgaatggtcggcatcctgctatgcggtctgccagggtttctcagcaacctggtagtgcagtcgagtcatatcagtcattgcctactacttcactggaatctatacaaggtaaatgcccctatgttgttaacaaccgtgtaatatttatattctctctttatgttttgtttagtaccagatttctgttgagagatgtagatgacacaaacttggtagctgaatttccatatttaacttcaaggtttagacaaattaaatgttgctggacatcttggtcctattattcagcaaaacaatgctttggaccttattgcttacgctcaaaccttttgattttcttttgtgcagatggcgtaattgaaagcataaaagactctgccactagcagtgcccccataattgtgaggaaggatgtggcaacacaaacaagccctgatattagcaggtcatcttctcccagcatgagggcttccttctcccgttcactatcggcacaagaagtcaaagagctggagagttgtttctctaagcttgaggtcagggatgtgcaagtggatgatcgagttactctgactaggtggtccaagaaacatgtcacccgaggctctgacaagaatgcaccaaatattattgaatggaagaaaaagactgtggattctaaatcttcatcagaaactgcaaagttaatatcaaagtaagaggctgctattgttgaaccttttcagataaattagttgtttggcttgctcgatccatacatactactattcctatgcaccatatttttgtatcaaactaactaattagatgtttacttcacaaaatcatgcaagaaattctttgattgtgtcttctaatttgctgctctacctcaagtgtcatttacaaaatgaattttaatattacaatgggataactttgtaaagttgttgcatcactttttatgtatagctttggcctttgggaaatgtgtttgatattagatctaaaattttttactgatttaagcaaaaggatgagggctagtgcctcttcacactaatacaatggtgcctgaaatttctttataagactttcgaaagaagactttctaaagttgataactgctaggagcaaaagttacatggctagtgttagaacatagtttatgtaggaatgtagctgcctttgtctactgttacaccttcatccttcctac

SEQ ID NO: 4810 - DNA, 5864 bp, Sorghum bicolor
aagtccaaaatgccaaaccattggggatggccatattttttcctttgcatttgcaattgagagttggcaaacaacaacaaatgccaaaccaaaattaccaaaccattggagacgttgcggatctcagaattaatgctaccttttctggagtagttgacaagctaaaaggcagcattaagcagttgcagctcagattctccttttttaggctagcctcttttcaggtgttatatattgccttctttttctttatataaaaaaatacaaacgcctttgtacttaaggtcgtactcccttttctcaactttaattatatttatagaaaatacttgtaatattatatcaccaaataaatttattatgatagtatatctaaggagctattgcgttcttacccttattttgaagtctaattgtgattttacctttatttttgtcaccgttgcgattttacccttgctttttgaaaacaaagcttcattttacccctattccatgaacaacggttaacggtgttaaatgggctcagtaaggacaactttgtctttgtgaaaaggcctctacttacattgtgattttacccatacttttaactctgttagtttttttagtattttatatttcatcattttaaagtagttgatattttctattggaagaagtccactttaggtccctcaacttttgcgaaagtctgtttttcatccttgagcttcaaaaccgggtaaattacatccctcaactttcgaaaccgtgcatattacgtccctggcatggttacaagcggttttgaaggctgttttgtctttttcatttttatttatttcggctgaatatttgtaaaattatagtaaatcacataaaattcataaaatagtaatataattttgttggactccagataagtagatctacacaatgaacatataatatgatatgctttagtagaaagtttttgttgtagctttagatctgtgtttttctataattaattagaatagttcatagctatagtttatatggtccaattatgatgaattttttatgttgagctaattattatatgtttaaattgtggtaaaaatttaatactcattagatcatgtataacttagttatagatttattaagatttaacaagcataaacctaaataaatctataactaagtaatacatgatccaatgagtatgaaatttttactacaactgaatcatagaataattagcccaccatataaatttcatcacaattagaccatagaaacggtagctataattagtctaattaattatagaaaagcatagatctaaagctgcatcaaaaaaaatatactgaaatatactatattatatatttaatgtgtagatctactcatatgaagttcaacaaagttgagttttctattttatgatttttatgtgatttactgtgatttttcaaaaaattcagccaaaataaataaaaagaaaaagacaaaaccgctttcaaaaccaggccaaggatgtaatttgcacggttttaaaagttgagggatgtattttgtctggttttagagttcagggatgaaaattagacttttatgaaaattaagggacctaaagtggactttttccttttctattttgtattttatgagaaactaaacacaccctcaataaaattaaatgtggtcgagtgtcgttgtggtcttgcattatggaggccgctgcagagcttcgtctgtccatgggccatagtgccatacgatgaagaactcgagcatggcggcgtttatggatagcccaagacggaaaggcctgcatgcctctgcgaaaggcaaaaaggcccgtatgggcccgtcacagaggagaggcccagtagtccaacaagaaaagggaaagcccagtagtccaactagaaaaaggacactgacaagtgtcaggaggacatcaagagtagagttgaggttccccttcttccccctgtcgtctgcttcacattcccacaatcccggtgccgtggtggtggtggtgtgctgcgctgtcgtccctctccgaccttcccgattcttcttctcccttcttctgcgtcaggccgccgcggcatcaccctccccatcctcctcctcaccatggtgtcggacgccagcaagaagaaggccgcgcagaagaaggcggccgccgcagccaagaggggagccaaggtcccggccccttcctcatcctcctcctcctctgccgccgctaaggccgtcgatgccgtcgccgcgctcaagctctccgatcgcacctgcaccggcgtcctcgcctcccacccgctctcccgagatatccacgtgagcatccctgtttatccccgatccatccgttttgttatgataggggagtttttctttttttttcccccttttctgcagagagccaattgcaacctcgtaattcgttttttaggcaaaacgtaggctgatgaactattttctctgggtagtttctagtattttactaaaaaaataactcacagctagccaggtgggctgggcggtgcctaggcagcagaatttgtaaatactgacgtcttttatgttttcaagccttcctttcatcctatctctctgatgttccacatgaagttggatcatcggattaattctttatacccactataatatggcttagtgtttaacgaaatatagattccagtttcgctgccacaaataacagtatccctcaacccatgctttttttagtagttcatttcttactgaccgcctagtgacacctaatatgatcttttgcatgttgcagatagagtctctttcattaacgtttcatggccatgaccttattgtagattctgagttggagctcaactatgggaggtagacatatactgccatcacttatagccattccgttacgggttacgaccaagtgcgctgcccgagcacgtcactgacggttttaattggtctcaggcgttatggtttgctcggcctaaatggctgtgggaaatctactctgctcaccgcgataggctgcagggaactccctatacctgaacacatggacatataccatctcacccatgagatcgaggcttcagacatgtctgcgctacaagctgttgttagttgtgacgaagaaagagtgaagttggaaaaggaagcggagattttggctgcacaggtcacgtcttgaacttcctcacacatttgttacaatacacctttctctagtcttgtctgtattctgctttgctgctcttgcaaattataacttgatgctggagaacgtcctaacatagtaacatgtattatgattgttcacacttttaggatgatggtggtggtgatgctttggatcgtgtatatgagcgtctagaagcgattgatgcatcaaccgctgaaaagcgcgctgctgagatattatatggtttaggttttaacaagcaaatgcaagctaagaaaactcgagatttttctggaggttggcgtatgagaattgctttggctagagcactgttcatgaatccaacaatccttttgcttgatgagcctacaaatcatcttggtaagactcttaaattctaaactactgaagtagaaaaccaggatctatgtggatataaatgtcttattttcttggtagcttttggatatgaatgtcttgttttcctggtaacttttgtgaactagaaacctactaaatactccaaattttcatgtggacgacgatctgcatcttctatgtatatcatattcatatttgtatatggatgacactgataaacagcttggttgctaatctaagtagctgagttcatccaaagataagatatgatgtcaattgctgtacctttttttttctaatgtatcgcacaacatggtgccaatgctacatatcctgttgagcataaatgacttcgatcagcactccaattgttattgcctcatagcattcatatgttatacctgtagtctgtagaatgattaaaaacttgtcattgaagtccaaaggatttgcagaaaggttttttttcagggccctgttttggtgaacttgttgctccgctaaactaatttcttatgttaatttgcagatcttgaggcatgtgtctggttggaagagatgctaaagaaatttgaccgtatacttgttgtcatatctcactcccaggactttctgaatggtgtgtgcactaacatcatccatatgcagaataagaagctcaagttatatactgggaactatgaccagtacgttcagacccgttctgagcttgaagagaatcagatgaagcagttcaagtgggagcaggagcagattgcatcaatgaaagagtacattgcacggtttggccatggatctgcaaagcttgcacgtcaggcccagagcaaggagaaaactcttgcaaagatggagcgtggtgggctcactgagaaggttgttagggataaaatactggtcttccgcttcacaaatgttggcaaacttccaccaccagtgcttcagtttgttgaggtcacgtttgggtacacaccggataatctcttgtacaagaagctcgactttggtgttgacctggactctaggattgcactggttggtcccaatggggcagggaagagcactctcctgaagctgatgacaggtgagctggctccattggacggtatggtgaggcggcacaatcacctgcgcatcgcacagttccatcagcacctggcagagaagctggacctggacatctcggccctgcaatacatgatgaaggaataccctgggaacgaagaagagaggatgagagccgcagtcggtaagtttgggctgtcagggaaggctcaggtgatgccaatgaggaacctgtcggacgggcagaggagccgtgtcatctttgcgtggctggcatacaggcagccgcagctactgctgctggatgagccaacaaaccatctcgatatcgagaccatcgactccctagcggaggcgctgaacgagtgggacggcggtctggtactggtgagccatgacttcaggctgatcaaccaggtcgctcatgagatctgggtttgtgagaatcaggcagtgactaggtgggaaggcgatatcatggatttcaaggaacatttgaggagcaaggctggtctatctgattaactagaagggaaggccttttttttccttctccttggagatttaccccttgtataatgtggtataggcacccaaagttttatctgtgtatcacattcagcaatcaccgagttgttatcgagtattagtagtaatatagatcatccaaacagtgtatcagtatcgagctgagtctcataataagaagcgaaagatttgtagtaataaagcaatattctcgtttcttttccaaacgtagtgatgtgggatttgcgcgtaggttctatcatctcttgggaagctagatctccctacatttctttattctattgtagagtagctcaaactgttcttatttacagaggttccggatgcagctgtgcgtgacggctccatcctgtaggttttcttctgttgcacgaagacggtggataaatcccctacaagttaagttcttcctcaaccctaccaatccccattaatcccttcgattttaacaacaaccgaacaaggcctaatggttgtgtaaaatggaaggcatttgctactaatctaaccaaactgcttcccttattcgttgttacatggaaatgaaaggtaaggtcctttcgacttccctgaggtcattcttccggaagccagaattcaacctcaaactacaagacaggtaatcgtgttaaagtttcaaaaaaaaaaggtaatcgtgttaagaatggagagcgagagaaacagcgagtgatgcaaatgattg

SEQ ID NO: 4811 - DNA, 5177 bp, Sorghum bicolor
caaacgctgagcaggttggcaccggacgcgtccggtgcacaccggactcatgcgcagagagttccgcaaacctgcgggtcaccggacgctaagccaccggaccgtccggtgctcaccggactcacacccagagaggtctgcgaaacggacctcacaccggacacggaccaccggacgcacaggccagcgtccggtgcctatcgtccggtgccttaccctaactgggccaggcagcctgcacaccggacgctcagacacagcgtccggtgcctctgagccagcgtccggtgagtgttcctcagcgagaaacactcccgtgacttctccaaattttgccaccggcgcaatagaaaatatgcacttcattttctcgaaaagcgccgaatcccgcctcgcaagctcggcgggagggagagaggaacccatcctctctctacccttcaaactccacctccttctcaaagtgtgccaacaccacaacgtgtaaaccaacaagtgcacgtgtgttagcaatttcacaatcattttcttcgaaggagttaagttagctcactaggttctaaatgcatgcacatgaacaataacacctagtggcacttgataaccgcttagccaaagaattcccctctttatagtacggttatctatcctaaatgtggtcacaccctctatggtgtcttgatcaccaaaaacaaaaccctaagcaatacctttgccttgatctccataggattttatttttctctttcttcttttccaagttgagcacttgatcatcttgtggtcatcaccatcatcaccatgatcatcacttactccatcacttggcatgtaccaacctcattaagtctacacacacttagtatagaggttagtactagggtttcatcaattatccaaaaccaaactagggctttcagagattaactacaatctaacttaataaggggtaacaacaaggccagagacaaaaacaggagcgtagagagcataactaaagttttctagatctaaattgggtaagttatatattttagtgttcacctggggacattactaagaaaaagcacaaacaggcacatggataattttgactgtgttttctgcagctgctacactaagaaatccttggaacaactcttctttcaatgcccatttttgttgaaagttgttggaacaccatcaatttccagttgcctcaatctctctcaagatggcccagatactttttagtttttaagatacaccttaaccagccattcttcatggatatcttcattctactttgccaggtgcgttgagtgatagttggtgccgataccaggtgcatcgattgaattgtggcgtgaaagacgatcgagagtccgaacatcttgactccgtcacgaagagatgactgatgagcgattgcatgctgatttcatgtgggctatgtcaaaaacctaaaaagacagctgacacttaggctaattgggtttaaactaattggacttatgttcgcatgtcttaaagttggcaccgtcaatacagcgtcgttttggaaccaaccatcagtcacttctcaaaaccgccttgaaccggtcttctctaggagtcgtcaatttatgccgaatttgacccctttcaattagttaattttgaaatcggaatttaaatctcctgatcaccttttgctgtcaaaaaaagatctcctccgtgagtgtcagcaaaggaggtaagagagaagctcacaaaatgcaatctatttcagttccaagttccaatggagaggtttctggagcaagttccaccgaacaacccagaaagccagacgaaaaatggacagattgcaggagcacgagatgcaccgtgcgtgcctcgcttgcattcgcgtggcttgtgacgcgagctgagccacacgcggcacatcagaacgcatctggctgctcccgctctcggaccgggacgggggggatcttcttcatcgccctggcagccgtaggtgcccctcgagtataataaacgcgagcccaccttatcgccagtcacccaccccaccccaagaccctcccaaagtcccaaaggccgccgccgcccgccagcctgccatggccgcgcagtccttcctcctcgcagccacggccacggccacgaccgccgcgctcttcgcggctccctattcctccgcacgccctttccactcggcccacttcgtcgccggcccggggggcgccgccgccgccagggcactcgtcgtcgccgacgcgtctaagaaggccgtagccgtcctcaagggcacgtccgaggtcgagggcgtcgtcacgctcacgcaggacgacgacggtgcgttccctgcctatgttatgttatatcttctcacctcgcccaccttccgtatacgagtacaggctagcttcggcaggtgcctcgctgggcagccaaaacagggaactttacccccgccccaccctgttaattgggtgcatttcgctctgggttgtagcaatttgatcaagctcatgtcacgcttagctaaaagtctgaacttgcttctactagtagtaaatcggatacaacgattgcgtcaatttgccctgcagcaagcatcagctttgacgaaatcagcgtgatgcttgctgacagaacacaattggaagacagctttcgttcgtaccactgttttgatgcaaatgtatgatgcgtatgactaaaatccatcagcaaaagtctctaatctcgctaactcaagtgaacgtgcttcctcaagtgttactcggttagggtgctaaccacgccgagtgttgaggcttagctcattgattgctgactgcctgacccatgcagttccctactgacttcttatcaaactatgacttatcatcactagcgcacatgtattttttcttatgaaatgcaaatggttttgtgtctactcttacccctctgaatattgatcttgtataacaggacctacaactgtgaacgtccgtatcactggacttactcctggacttcatggcttccacctcgtgagtattgttatcttcagtagctttcagcagtaacttcttcatttgtaaacatgatgatgataaaattgttcattttgcagcacgagtttggtgatactaccaatgggtgcatatcgacaggttgtaattttccattgatcttaattgtgcccgcaattgtgatatcttttttcttaatgtggtactccctccattccaaattacaagtcattttggtttttcttgatatatggtttttgctatgcacctagatatatgttatgtctagatacataataaaaactatgcatctagaaaagcgtaaactccaacccgctcgtgaaaagaaagaaaagcctaaacaattggaatggagggagtactgaattttggctgtcttatgcaatcactgttaaatttccataaaactaattttgtcactaagatctggtgctattcattccctttccttctggctatagtttcatgcatcttcagttatataataaatttagccatctagctgttcaagttgccaagtctaacttaaaagataacgttttctatcttacaggaccacattttaatccaaacaatctgacacacggtgcaccagaagacgaagtccgtcatgcgggtgacctgggaaacattgttgccaatgctgagggtaaggcctgtagcaaccagtagtacacttgtggtattcattagcaaatttcttcttctggattgtgacttgttttatggcatgtttgtataattggtcatgacacaggcgtagctgaggcaaccattgttgatacccaggtaaatttggtagaccaagaccatacttttatactatataagttgtgtccgattcagtttggtaatttttgtgattccttggtattcagattccattgagtggcccaaattcagttgttgggagagcatttgtggttcatgagcttgaagatgatttggggaaaggtgtgcctagttctacttgcattccacattttctttctattcagttagtacgcaacccttttaactttgttctttgtgtttaggtggccatgagctcagcctctctactggaaatgctggtggaagactggcatgtggtatgttctctttgctatatttatgaatccttgaacgtggatatacgatgatgatgtcgcttaagtataatgagaaggggcattgaaacttgtaatcggtgtccattcagttgatttcaacgacgataaaaatataagcccaccgcaactgctttacatgaagtattcatgtgaactccaaagtgttttatgttcttcacctagtgatcattgtttgtgttgctgaattatttgctcttgtgcaatgtttcatgtccatttatctaattgctgtgttccttgcgcaggtgttgttggcctgactccattgtaggttgctcgccgggtgcccgggttgcagttgcagcttcgctgttacatccttggtggcctgttgtcttcaatagtgttattgggacagtgccttttttttgtattacttggattcatgccatgcatggtatggtgcgtaatatcctttgcagttcggttgtataaaaaataatatttagctgaggaaataagtgttgtcacatatccaaatcgatctatgaagcactatgaacatcaactatttactgctacgttgttttcgtacctgaaacgtttgaacatgcctgttcttgcatcactgagactaagctggctcgctgcatgtgctcttcgtgtcatttttcctttccacaggtcattgttgtgtggggaaaatataccgtagacttattacatggaaacatgaaaactagtttaaaaaatgtacttttgtgactttccacaggtcctttccacaggtcatttctatgtggcagcctatttaatgtgaatgaaatttagataaaactttcactgagattggccttagggctcaacatttctatgtggcagcctatttaatgtgaatgaaatttagatgaaacttccactgagattggccttagggctcaaatcgcgatgggtaaaatcatacactctgaggctctcagctctgccacttataattaactaatttgtcgtttggatcttaaaaatagaatctattttgataaaaagttagtttaagaggaattctaggaaaaccagcttaagtttactattc

SEQ ID NO: 4812 - DNA, 8753 bp, Sorghum bicolor
cttttcgcgaactaaacgagaccgatacatatgcaatccttacgtttgttgcctgcatttgctccggttataattttaagtgtgatccaccactgaataacaaaacatgtgagttgtagcccctatttctattctcgacaagtattttctataacataatttttattggtgttaagcatctccaacaacttggtaaaatttacttgtcaaatcttgagttatagcaagttgctaatttgtttagcaaaagaaaaaaggatgtgtctccaataagttgctattctcacttggtaaaaatagaggatggcagatgtgatccgctcacttgataaaagaatatgtgtctccaacaaattgcgctcgggatagcaacttgggatagcaacttgacaaatctcggcagtagaaacctctggatagcaacttaggaaatttagcaagttgggataaggagttgttggaggaggatttttatgcttttagcaaatttggtaggatagcatgttgaaataccaagctgttggagatgctccaaaagctttagtagcatctcagcttctgagttcgactctccgtaaaaacatatctaaacaacttggcaacatggttgatgttttctaccttaattataattacagttcaatgtcctaggaaggtcagctggtcgattttttttttgaatttgaagataatttattggagataggatcacagtaggcccttgggcttcggcccccacatttcgattttccaattgaaaaaagttcactttaggtccctcaactttcacgaaagtctgattttcgtccctgaactctaaaaccgggtaaaatacatccctcaacttttaaatccgtgcacattacatccctgacctggttttgaaagcggttttgtctttttctttttatttattttggctgaattttttgaaaaatcacagtaaatcacataaaaaacataaaatagaaaactcaattttgttggacttcagatgagtacatctatacattgaatatataatatagtatattttagtacaattttttttatgcagctttagatttatgcttttctataattaattagactaattatagttatagtttctatggtccaattgtgatgaaaattatatagtgggctaattatttatgattgagttgcagtaaaaatttcatactcattggatcatgtattacttagttatcgatttattcaagtttatgcttgttaaatcttaataaatctataactaagttatacatgatctaatgagtatgaaatttttaccatagtttaaacatataataattagcacaacataaaaaattcaccacaattgggccatacaacatatagctgtgaattattcgaattaattattgaaaaacatagatctaaagctacaacaaaaaactttgtactaaagcataccatattatatgttcactgtgtagatctacttagtccaacaaaatcatatttaatattttatgaatttaatatgatttactataattttacaaatattcaacggaaataaataaaaatgaaaaagacaaaactgccttcaaaactgctcataaccatgtcaaggacgtaatatgcatggttttaaaagttaagggatgtattttatctggttttgaagttcagagatgaaaaatagacttttgcgaaagttgagggacctcaagtggacttcttcctttccaattcacactgcagactcgtggagagaaggaaggaaacatcaaagcgaaaagcgaagcgccattaacaggcctattgggccgagcccagttcacacacctggagcgccgcccatccaacggccggatagcataaatccgccgcaccgcatctttgctgctgcggcaaccccaaaatttcgaattctctctctccccccaccccgcaccccgctcctcccctctggacgcagacattttgaaatctccccccagccaccgctgctcttcgccgccgcgtgcgccatgtcgtcgcggcaggacaaggagaaggcggtgaacgtgcaggtcctcctccgctgcaggtacgtggcatgggcagccgccgagttctcactccctctccgcgcgcgcgcgcgtgcgcgtcgtcggtgtcgtcccccgcaaaccccagatccaccgccctctgatccccccgcgtggttgcttccgcaggcccttcagcgacgatgagctccggagcaacgcgccgcaggtcatcacctgcaacgacttccagcgggaggtagccgtcacgcagattatcgccgggaagcagttcgacaaggtcttcacattcgacaaggtctgctgcttcctacctcattccggacccggagatctgagagtttgagtggctggatgcgcttcccccactcctttgttgggtcgcatttggttttactgcgatgaggctgtggatagctctgtttcggtgtgaccaatttaaaatttctgaacgcttagcgaatccccgccagtattcttttgtgtttgttcccctgattgacttttagggacatttgatatctagggttgcttaataattagagctgttgcttgcatccgaacaagttcaatttgcagtggaagcgcctggcttgtgaattcaaacagtcacgtttgactatatcaaaaaatctggatcactcatgataaacacctgttcttcacgttttaattatgctagtataagtcctctgtgctaaaagctagtgcaagaccgtgaggcaatcacgggcaagctactatcaaaagctagtgcacgccgcaccacaaagctttactactttgattcaggtttggctgccaggtgcagagctgtaacatgaagtaccctcattccattcgcaggtttttggaccaacagcaaagcagaaggacttgtatgaccaggccatcattcctattgtaaatgaggtcttagagggattcaattgcaccatttttgcgtatgggcagacaggcactgggaaaacgtacaccatggaaggagagtgcaggagagccaaggcaagtctatgctgttttttatgactgtattatgcttcttggttgtctcaattgctgattactgctagtgctcgaatgcttgcagagtggaccaaagggccaattacctgcagacgctggagttatacctcgggcagtgaagcagatctttgataccctggagaggcagaacactgagtacagtgttaaggtcacattccttgagctgtacaatgaggaaattacagatcttcttgcacctgaagagatatctaaggctacatttgaggataaacagaagaaaaccttacctcttatggaggatgggaagggtggagttcttgttcgaggtcttgaggaagaaattgtcacgaatgcaagtgaaatattctctctattagaaagggggtctgcaaagcgccgcactgcagagacattacttaacaagcaatccaggtcaatctcactctgtcttgttctgaactataatgctacaacaaactttaagtgctcattaccacttttaacattttatagtcgatcgcactccctattctcaatcactattcacataaaagaggcaacccctgaaggagaagagctgataaaatgcgggaagttaaatctagttgacttggctgggtcagagaacatctctcgttctggggctaaggaggtattgtatcatgtaacaagcttgaatgctgcttttaaatactctcatcttttggcatcaattgtattgtattctaaagtaaggcacttcctcttgactatagggccgtgcaagggaggctggtgaaattaataaaagcttgcttactctaggccgtgtgattacggcattggtagaacaccttggacatgttccttacaggtaagcagcagttgatcatgttggtgcagatacactaattgctgtttgtttccttgctgaaaattctcctatctttcagggacagcaaactcacaagattgctgcgtgattcattaggaggaagaacaaagacttgcattatcgctactgtttcaccctccgtgcattgccttgaagaaaccttgagtactttggattatgcacaccgggcaaagagcattaagaacagacctgaggtgatatggcttcactttctcagtttacaacctttgtactcattatttctgtgtaagtctaatggaattcttgttatccttattcttcaagccatgaccgaaaaggcaaatggcaaaacaaacttggagacatatcagctgtaatgtttgtgattggatacttgatacagatggaaatgttcctactagatggcatgcactctccaaattataagatgttttgacttttctagatacattgcatttattatgtatctactactatctagacatagtgcatatctaagttcatagcaaaagctatatatctagaaaagacaacattatataatttggaatggaagggagtatatagcaatatgaataaacatattttcatttgcactctttattcacttatgcagccacctgcctaaccctttttttttttactttgtagtagagtagcagttatggctttgcctatgctgttttatgggatgcaagcatttagatggccctcttggtgaaaactgtgctatgatttgttattgcattatcgccatctcatttgatccagcattacacaccaatttagttcttgatgtgtttgtggtgtttgagatattcaattataagagacgctgaagtagtctggataagtctttgccattgttattctagaacgatctataaccacaaaactcacttttgggcatgctcttgctattttattcatgtttgacacctgatattagttttttttggtatctttatttattgcaggtaaaccagaaaatgatgaaatcaacattaattaaagatctttatggtgaaattgaccgacttaaggcaggtcagtagtgaatgcacataatgaattcatctcaacagaatggtgacactagttccccctcacaaaacttgattgctctccagaggtctatgctgctcgagaaaaagttggagtgtacattcccaaagacagatatcagcaggaggaaaatgagcgaaaggtagagtttagcatgacatgttttaaagttagtcaatctgaaggggaatcattttctttccaatcctgaaataacttgttttcttttacctttccctatgaaggcaatggctgatcagatagaacaaatgaatgcttctttggaagcaaaccagaagctaattagtgatctgcaacaaaagtatgattctgagcttcaacattctgctgatttgagcaaaaagcttgaagtcacagaggtaagttgcatgtttcttaatccggttactttatggttatctaaaccataagtcttatagctgtttactgtgatagaaacatctggaccacacaagcaacctactctctacgacaaaagaagatctgaagcaggcacagtacgatctaaaggagaaagattatataatttcagaacagaaaaaagcaggtaccatttaatcacattgtccattccaggaaacaatttattttactatttttaatagtgacttaactaattctattacagaaaatgctttaacacaccaagcttgtgtgctgagatcagatctggaaaaatatactcgtgataatacttcactgtattcaaaaattggtaagtgtcttggagcatttctgttactttctttattacgattgtcatttgtgttaacatattgttgaccatgatgagatagctaggggagacaagctaagtgcaacaaatagatcagtcgtgaatacattccaaactgaccttgcttcgaagttggatattctttcgaatacactcaatgcatccatagatcaacaaaataggcacctaaagtctgtggaggatttatgccaatcttgtgttgagtcccatgacaaggtaactattaccgaaccattaattggcatacctaattctggactgaattacctcactcagtgacttcatattgtatgctcactatttttgtttgaacatttgaaggctacttctgagctgaaaaagaagattttggcttcaaaatcattgtacatgtcgcatatggaagctttccaaaatgttgtcctcctacataaagcaagtgcaaatgccacactagaagatatatcatcactgtctgctgcaagctgctgtagtcttgaccaggtaagtaacttggctgcttgtgtagcttaataaaaatctacttctgtcaagttcttgatcctaactgttgttctatttatgttcatggaaataccttttctcacagctactatcatgtgttgagggagaggcacagaatatatttaatgacattcataaattgttaaccacccaccgaagcgagatgacacacttcactcaagaattaagggaggtcagtcacaatctctgatgatttctctcttcatctagatttttaacatgccatctcttaattggagttaattcatggtcttgtagagtttccgaataagcttggacaggtcaaaagaaatgtccacttatattattgggctatttgacaagtatgttgaggaaacatccaagttacagagccactcaaataatactcatgaagctcaaatgaaaagcattgaagattttcagatggcttatgaggtgagccccttagccctctttttgtttgctgcaaagtttggtaggtgtgtatctaataccatcttcttgtgcaggagcaatcaaaatcagaggagcagaagcttctagcggacatcagcagtttagtgtctaaacatattactcgacaaagagagttggtgcgtgcatgcccatgacattattcttgcatccgtttatttcatgtctgtagcaaaagcttggggcctaccatatagggccacaagtacacgatcctgacatgcattttctatcaggtgggtgttagattgagttctctgggtgattctgctcgtggaaacaaggcatttttggatgaacacacatcggccatggagtttgtcacaaaagatgctaagaggaagtgggaaacatttgcagagcaggctgagaatgactgcaaagctggctccagcttctctgcagctaagcattgtcgcatggaaaccatgctgcaagagtggtatgtcaacggttgcatatgattattttttgttcgtccacttatccgttgaacttggatttcatgagtaatcatttgtgcttgacttatccagcgcatgcactgttgactccgctgttcagcaatggaagacgtcacatgctgctgttaacgatctcagcagaaaacaagttgctgaagttgaagcactcctcaggcaagttgattagttctattgcatctcaataaattcatttggcactctcttagagggtctactttggtgacaatttgcatgcccgtgcataattttagtgaaaacttcttataatttgagtgacagcaaataagcagccaaggggcagttgcagtgcctgagcattcgagtcagcacctttgtttccaaaactatgtattggccgttaatgtagcttggttgtatttttcaggactgcgattgagaacaatgagcaacatgaagtggagattgcatcttctcgagctgtggctgaagaagacgcctccaataacagcaatgacatagcccagggcatcgaaagtactttcttggcactcaatttgttcatcttagccagcgcttatagagttcccttcctgatttgggcatcttgatacattaatttgcttcagatctgttggaagaggcacgaaattcgagttcaagagtggtctcaacggtggaggctcacttcgcggagctacagaagctgcaagagagccactccagccaggctgccggtatcaacatgcacgccgacaaggctttccaaaccagttacaaggtgagactgaaaatctgctgaaagcctgaaactaaagtgcttgcctgagttgacaatgaatgaacaattgaaactaaactctgcaaatgtttttctttcaggactacgaaccgagtggtgaaactccggtgaggtctgagccgaatgtgccaagcaaaggctcgattgagtcgctgcgagccatgcccatggagaccttgatgaatgagttccgtgagaaccatccttatgaatctgaatcgggcaaagagtccaagttaactcagattcctcgcttgccgcttgcgacaatcaactgagacatttacatccccgtgtgcagtgtaatttattagtagggcatcaattcgccggctttttttgtccgtgttgtgcacttgtgctaggttaactgtggtggggggtgagctgccttggctctcccccagtgcatttcccttttgttcccaatcaatcgtttgtaacattttgtgttgtgcgatactgattgtagagcatcagaaatttgtgaaatttagcttgaattgcattggaatctgaatgttgcgttgcattgtgcagacaaatgataaggttttgacttttgagcattgcacaaattacaaaataagcgatagggtttttgacaagactagagatgagttttgggcaccatcatccatctacactagttggtaaaaattcaggcgagatagagctgcatctcggagcggttctcctgctcgaccacttccaggaagacggggtcgacggtgatgtggctgtcgatgcggacggagaaggggcgtgaccagagcag

SEQ ID NO: 4813 - DNA, 8041 bp, Sorghum bicolor
agctgccaacacaacattgaaaagaagcataattagtgttctgtacaggaaaaaacatctaatgaactttgaaatgtaaaaacagcatagtatactagcaatttaccatgtgtataggcccattttgcaatgtacttgtgcacctcattggttctttcattccaaagatccttgttcagctgttgttgcttgaaagaatcagctgcttttgctttaggatcaataacacgtgtccatttgtcgatgggtcctaatttgtggggctctgaacttccaacacaggtgacttcatcagaatctgttccaaccctagagacatgaacttcctctctaatttctagctcacgaacagtcttctcctccctctttctttttgcatcagctagtgccttcttgcacttctctttagcctccatagcctgtggagttcttgctgggcatttcttcacattctttccttcatgagccaaatgctccttcagcctataaatccctcctctcatctccttgtcacagagcttgcacttcaccttgtccttgttgctagcatcaacaagaacaccatattcccatccaacatcatctgagttccttttgaggagattatttgccactgctggttcaggatgttctgtcgacatcctaccgattgcaacagcatgcacatagcacaccctattagtctattacacactaacaatgaaacagctgagaagagcagcagctaatgtgcatgctactgaacaaacagcaaggcaaagagcgaagaggggagatcagcaggggaggagctgggagggaagggagctcaccttggggacttgtggtggccggcggggaggtgttccagacttccagtcgaggacgagcagggcagcggcggcaggggacgaacttggaggagcaggggacgagcaggaccggcgggaggaggagcaggaccagcggggggcgcctcggggatgagcagcagagcaggggaagagaatggaggacaggaggagcaggggaagagattggaggagcagggaggtcgccgcgctcccttctattctcccgcgcctccgtttcgtggccgcgcgcgcgcctggacgcgcgggatttggccgcgctcgccgatttggcgcgggagatttggcgcggtcgcgcttgcctctccgatttggccgcactcgcgctcgcgcccgcctacgcgccgactccgcgccgcccaacgcgcctccgcgccgcccagcgccgactacgcgccgcctagcgccgcccagcgcctggaagcgcgactatggccatagtcgaggcgacgggcttcgcctagcgcctaatcgcgcctaatcgccgcctagtcgccgcctagccgaaccttggtttttattttcatctatatttaatactccatgcatacgtctaaagattcgatgtgacgaggaatctgaaaaattttgcaaaatttttggggaactaaacaaggccctagtgtttcatgttgcagcctgcaattgtacccgtgcagtaagttccaccagcaattctgtaattctgtggtgcccttgtgtgcatacaatatcatccatacccaggttctttcggtttaaaaagatagcaagtagctactatgaactagaaaataatactaggtcaacttcttcctagcttgaataagtggagggttttgcagggtctctatgttaaaaaaagataatcagtattagtatattgtttaagctgatttaggaaatctgggttgtgttttgttacatgttcttaaaaaaacccttaggggtcctttcatgttctcaacgaaacctacatttaatattactgactgactgttggtgggataaatcatgcatgtgaaacctacatttaatattactgactcactgttgttggggataaatcatgcatgttttaatggttacaaaggaattgtgggggaaaaaaaacctgaacctctttacattatagggtctggagctgttctagcgaggtcatctcagccgatggtggggttgatgatgaactttagaaagtgagtttgtatctacctaatttccctggaacacctgttgtctcttcttgaatttggttggtctaatgttaggacattgtctgtagcaatgcggatgagaagcttgtctgtgctcttagcagcagaaccaccgatgagaaaggatctccaaggtattgtcgtatgcatttcatgctatattggctcatcttttagtattgccatccattaaaatattgtatcctataaattttctatacctcttccccttctattcactctttcaatttcaatttatatatagatattatagattagttataacagggatgaactttcagtttcagaatagctaacacgccacctttttctcttgtctcgcccttcttttatggcactaagtattaaaatttagaattacctcagacagtacatactgagctaaggcatgtgtatatttcggattagctgaagctgagggtttatttcaatagcagatggcgtggcacaattcgttttcctacattttgtctttaacaaaagggaatcagcagcttagtgattagagcagatggcagttaattattaggccattattctttgatgccctctctgcataccttttgactttttttggatatatattcataataaaaattttaaatagtgcttctgctcctgatgtaaaacaggaaattgtacataattgatgcccggccaagagcaaatgctttagcaaatggggcaaagggtgggggctcagaatcatcttctaactaccccagatctgaggtaatgttacatgtgatagttgtctagtatatagctttgcattgtagtaatttcccccctcttcttccatgaagaaaagaacatatttgctatctttaatccactggatctgggaccaggttctttttttaggaatacaaaacatccacacaatgagagatagtctttctcgccttagggactatgtggatgctcatggctcaatttcatcaaatggaagcccttcagctgtatctgttgttggagatcgggtaagttgatggtttgccttgctgatagaatttatgctgttttgaggttggcatctattcccagaatgcatacatgaactttgtctgggaatgtggtatcgtttcctttacatgcccataccaatggataattctgaatctgtcatgtaacatctgtttcagcttttcttctttgtgtagaacttcttttttagttctgtttggttttgcttcttgcctttttaggccagctcctgctgtttggcttcttgccagagagttttgtacagtttctttgtaccttctaataaaatctctacagagggggcctcccctgctgtatttcatgtaaaaaaaacatctgtttcaagctcgtcaactacgaagcagaaaaaaagcaagactggtgtttttaattatttttctttggcagaggaatcgtggatcaacctggggtggaggcaatctaaatagcatgacatcattttcttcaacactgggggaatggctaaaccatatccagaatattctggtcggtgcttcatggattgctgcacaaatttcagaagaagcagcgtcagttcttgtacattgcaggtttttatcttgatctctcagtctctaattcccattaatctatttactgtggtaaatggagattacaatggttaattttgttacatgggttgacctggcttgcatacaatgtgactgaatgcgtaggtaagattattactctttgtggcatgattacccccacagctgtgctctttgtggcatggttacccccacaaggctgtgaaacaatgtagatccttgtcctagtgttcataaaataatctgtgtaaccataaacctatggcttaggcttacttcgtttgattgttattgcactctagattctgtaagcatgtagtttattagttaggcatttcaaagatcctggtaattcaatgccaaatttaatttcagtagaacctacagtgttctaaactttggcccctaccagaatggagccagttaattgacaatccttttggtttatttttgagatgaataatcctttgggtgtcatctgaggatcctgtgtgatctctatagctttgtagttttttctttatagcatctgaatgatttattttgctactttatttctgcagtgatggatgggaccgtacaacccagttggttgcacttgcttgtttattgcttgatccctattatcgaactttcagtggattccaggtacacagttcgcagtagactcatggtcgcaaaataattattctcacatttgtgattctattgtaacttttagtttgtctggaatgttccactcaacatatggttatttaattgtctatgtgtgtcactgaaatggaaaaacagtgctggagtttatttcccttctttcttgtgtcgatgtgcaatgtgcttgcatttcatactgtatgagtctgccttggaatgttttacatattcttgttgggtcgtgttcgatacttgataactggctcttaatttttatgcttcagtaatcccatcagcttattgcctttcttattgctgataacacacttcacaatggtttaggctcttgttgaaaaggattggttagcatttggtcatccatttgcagagagaatgggagttccaacagtagctgagaatgtggggtcacagtatgagctactaaggcaaccttccctcggaaatttaagcagttctccaagtaggaacactttagggccatcaggaccatcctctaatccttcagttcaatctcagacatcaaacaactcttcaccgatattgttacaggtaggttcaatgctgctttctttttcccttatctgcttcagtactctaatccttgtatcttgataaatagtatcttctgatgtgttgatagctaatttgtcactctgaatttctgattcaatgattacaacttgtgaccttgtgttacttcattgcctggaagacatgcttttctgctgtgtggattgttgacattaggcatgcttgaaggcttctcaacttttaggtttaggttgcagaacaaaccatgcccttaagaagttttttttaaagaaattaggacttaggagtacatcagttagtaccgagcagcaagttaatcactaatcctctacaatattaccaatggagaaaacaacatcaatactggcattcagtggcaaagtgctgtgcttatgaataaatgtacttgttttcaacggtcactatgttcatgcattattagctgttttggatatatccatattttcttaattacatgagtcttttaatatggcttatactgtgtattatttttcagtggctcgattgtatctcgcagttgttacgtctgtacccatctgcatttcagttctcatcagtaagttttcttttcctccacaattagaagggtcagctacaagtctccatgaatactactcataatctttaaactgattttatttttgcagaaattcctagttgattttatggattgtgtgctatcgtgtcgctttgggaacttcttgtgcaataggtatacatttgtacccttgtttgtgatttgagctaatgtttcttcctgacatccactttagaattgaaaatttgaaatagcaataaattattgaatcatggcaatcctctgtaaggagacataagttctcctttcaaattacttttctggtgccagtgtttcccatcatgccatgattatgtgttattgtgttctttacttgattagggaaaacatataagcagcatgttttgtcctcatggcctcaccaccacaaacttatggcttatgaaacaatatatatttttattttttttgaacgtaagaaacaatatatttttattggatacctatttgggtggggcgttatttcacatctatttgaatggtaaaactgtggttctcttgagctcggcattgcttgtcttattttggcaaacaataatatcctagtttagaagttatcatttttcattctaaaattgtgtaacccacaagatttaactgttaccagttgtgtttccaaagtccagagcatgatctttatttgttccgtacgtgcatatctcttggtaataaattagcttgggagctttggaaacctagaaattcttgtgtttttgagggaggtagcccaagtatccagctgatgttgcaaaagatgggagaggaatgtggtctcggtgttcggctggagcctgagccctctctgagttggtaattggtataggtagtggtgttgggcagcaactagtcgctgtagtttagagtgtgttactgttggtgtttggggttctggattctcttgtagctcattttacttaatgaaatgacacgctgttctcctgcatcgttcgagaaaaatataaaatagctttaattcttttttcacctatacagctcaatttatatttattgtataatattctgcatagctaatttttggtttgaaatggaagtgaacgggaaagggagcaatctggtgtcacaaactcctgtcgttgcatgtggtcatatttggctaatctaagagcttctggcggcagcttccatgagcactataatccattctatgatccagtaaagcacaatggtgcactattgccccctgctgcagcacttgccccaacactctggccccagttttatttgaggtggacatgccccattgagtcacaaggtggtgatcttgaatcccaatggcatgctatgaataaaaaatatgcagatgcaatgaaggtaattatctatagcaattgcattttattttgtgaccattttattgtggcacacaaggccatattatttgttcaatttgatagttgtttggaaacttctatagttctattaaacaagaccgaaggacaacaaattcttggttgaagcttaaatagcataggagagaactattatgacattcagttcaaaatggcctatgtgtatcagatgtgccttataatttttctttttaccatggaatggacaggcaaaggatattgctgagtggagggcaaaagatatcaaattgaaattggaatctatgaaacaagacttgcaaagggagaaacgtgctagtagtacagctttagccacagctcaaagtgctcaaagggagaatgctgccattaagaaggcgatagaatctataggatgcacaattaaattctcgacaagcgaagacgaggacaaaactgaagtgctgtcgtgttcattacgaagaggcgcagatggtagagctcagcaagatgaaaatggtgacttctctgtatcaatctctgcaattgaggacagcctggtctcggatgcaccaggggaccatttttgcgaatcactctgccccttccgcacaagagaagggtgcagatggccagatgctccgtgtgcacagcttggaagtcagtttgtcggtttgaaggcaaattttgatgcttttgaccggttgtctatacaggactgctattttggaccagagtagttgatcatgaaccagctgtgtcagtacatgcttggcagttgccaatggattttttcagtagttggcacctccaggtctgcatcaatagcaaaagaatgatgcatgtttgacgagtatttgcaaattccttcattcaacatttttttttcactatctgggtcctccgaatctgcatcaacagaatagcctggaaagcaaatcaaggatgcatacctgatatgcgtcacaggatttttcttgttccaatgatcttataagcttctgtgagggaattccagccttctatgatagtagttagcaatttgttaggaaccactgggattgaaatcagtccctgtatatagtttggcaagccattcataaaataagcaaaataaagtgaaacatgaaaaagaggaatagtttgttactctttttctgatagtgcagtgttcgactttgtaactcttagctttagaataagagccatgcacatcctgcttggaaaggaaatgttgtac

SEQ ID NO: 4814 - DNA, 4402 bp, Sorghum bicolor
ttgtactcttttcaattttgtgaatgatttcaagctgagaaggttaaacatttatgcatattgtgaatctgtatgaattcacgagactacgagagtgttattgtcattgtcaattgtcattaatgttgtcagtgcttgcttcttttctaatgtcttcaggtttcactggcaagtgatgccagtctcgaagatgttgcttctctaactgaaggatttactggtgctgatctcgctgctattctaacggatgctggactagcagcagttcatgaacttttggacaaccaggagaatggtgtcccagaaagtgaaccgtgcatcagcaaagaacttctcatgtctgtcactaggaaggctcgaccttccacaccagcagatgagaagaggcgatacgatagggagtttggtgaattcgtgtcatccaggaagtctatttcgacgaaggtgcccatcattctcattttgaattcctcaacagtcaaaaccatgatgtttttatttaaaagttctagtatcatgttagtgtttttgctacatgatgagattcttggataattactggaagaattcggtgcaggcaagagagtcgaaaggcaaaaaggtcacactagcttgaacctttccttgggcaataaatattgatgtgttgcaaaaattggacaggtaaggcagcgctctttatggtttccattagttctcaaaaatttgaatttactgagcatttcgctgaaataatttccgttatacatcagacactaatctggttgtgattatcttttggtcagtggcccacaagaaggctggtaacaggtgtacttgtcaggtcatgtggcgtgcgcttcctttcattcgaagagaaacaaaatctacaaagaaacctaaccaagggtcccttgtgtatacttggattggatgggggaaggccattggagggacctgtagttggtggaaggcgcaagggcgctggtgaatcagtgttatagcactcgtcacaaattttgtacggtggtgagtagtaggaaatagaaattctaagagagaacgtgctaatcctgggctgttctgtaattagtgttacgatgaatgatccgcttcttaacgtgcggcagtcattatcatagatgtgctcggtcggggcactaccgctctagccacagggtttgcaaggagaaggtgttgatttgattccgtggggaataagtgtgaatggtggcctggtgccacttagctctgctgaataagcaccatttggtttgtactgctgggctacgagcctctgaaacctgggcgacgtgcccttatatctatcagttttggtttttggctgtggctgtttctggcgattattaattacctagcctaaccctgttttgggtctgttcgctagcacgcgaccctccggcagttttttttttaaatgaagtaaatattacaaatccttacataggccttgtttagtttgcgaaaatttttggctttggctactgtagcacttttatttatatttaacaattattatctaatcatgaattaactaggtttaaaaaatttatttaaagaatgtacaattagtttttatttttatctatattcgtgcatgcgttcaaagtgctcctgcctcgtgaggtggagagggggaggcggagaagcatcacgaggaggacgactaggaggagggcggttgcagcgtggacggaagaggagagcaacgtgctgcgcccaagcagagggcggctcggatccatcgcgatcaccgcaacggcgatgagctcgacggcggcgatgaggaaccctccggcgtttaaacacgcagtcaccacgcactgctgcgctctcttccccgttactagatggtgggccgaaatggacagtacatttggagcccaacgaaaaatacatggcccgcgaacagcctgacttggtgggccagcattgtcactgtcataggagccagcatccatcgagggtgagggacggaggcgagccgacccgaccgcgaccggcgtggagagagagagagagagagagagagagagaggaccagcagcagccgaagggagggaggacccctaccgggagggaggagcagatcagccagggaagaggagggcgacgatggcgtccggctggggcatcaacgggaacaagggccgctgctacgacttctggctggatttcagcgagtgcatgagccgctgccgccagccctccgactgcggcctcctccgcgaggactacctcgagtgcctccaccactccaaggaggtgagctatgtctatctacccccgtccgctctcctgcccgcccgtccatccgtcggcttcctccatttcattcgattcttcgtctcctgactctcaagaaccctagcgtcagatcccccaccgttcctccctcgtcttacctgtgtgtgttcggctgcctagatctgccgcgctcttggcctcccttctttgccatgcgtcattcttcggtttcagtcgctgttgtcatcgtatcggtcagtatggaggaatggatggatgcggcggtttccccccaatcctgttgcgaaatctggtgacgaagtggcagtttggagggtttacttcatgtctagggtatggcatttgtgatccagggaagtaatcaggcctttgaattgatcaggacaagtttgggtgatggttttatgcttccagcccttgtgtcattgattgataaacttaaattatatataagagtcctgataggaagacccaccggaagacctaagtactactatgtactgtaatttcctaagtgacattgttctggttcaggtttggattacttagactcctttctctacgttcaagcactggtatttatagtcgtttcggcctcttgctttaggtgattggctagcaagataattcccaaaccttctgctcgagaatgtgactaggatatgaaaatgttcagaagtagaaatcacaaatcatatgtactccctccgtcccttttaaactcgttctcgccttccaagaagtcaaacttgctcaatttgaccaaatatatacaagaaaatattaatatttatggtacataattagtacagttacatagatcgttgaatctatttccataaggtggtataaatgttgatcatattttctataaacccagtcaaacttaagaaagtctaaccaccatgaatactatagcgacccctaaaaagggacagagggagtagtacttatatctcaacatgtccaatgacatcctgatgtcatgtttctttttccctgttttggtttcaaagggtaggcccctgatttctttcatagaccaaaagaagctagtgaaatatgtgaatcagagtgaaaacttgcttgtatgagttatatatttcttgtttatatcctgttggcctgttggggtttaaatagtcatgactcatgaggagctttccttgtggtaaaatattagatgaacttatgggaaaatattgacacaggctttgtgattcttctgcagttccagcgcaggaacaggatctacaaggaggagcaacgtcagatcagagctgctgctcggaaggccaaggaagaagctgagggagccccagctgttgcagctcaccattagtctcccttttattttttctgtgttgtgttgttttctgtcaactcatctttggttcggctgtgatgctaagggcaaggcaataatctccaatctctctgttggactacacagattttttttccccatctcactccatgacttgttcagtaccatgacttacaaatagtcatggttatgaagttccagcctgtttgtgatactgcacgatgtgatgtgcctgatttttcctgtggcattgtaagaggagcgtttttgcgctaatgatggtttctggttgttgttttgcgcagccaaccgatgacttttctagtcacctcttctacccaaaatagcatgagatgtcatttgatggttatcaagaaatgtgctgtggtttcaaaaaaagatgtcatataaaatgtcacatccctgccattttttacatgaatacgttacaggcactcaagattatataaatatttagaaagtgatttttatctaaattatacctatgctatgaatagctagatcttaaaaccaaacatatacgacgctttgcagtatggatgactgcataggtaaacactcggcaaaatagatgaaccacgcccaacattcatgtaggcttagtctgacgcccaacattcttctttctagtgtctttctttttctttttgccaccgaagaatgaggaaaactgatctgaacttactctctagtccttcatcgtgatcaaatctaatcacaataaaatggagaagagatcggagaaaactatttcatagcaacgacactatctccaccctgatgtcg

SEQ ID NO: 4815 - DNA, 4316 bp, Sorghum bicolor
tttattttcatatcgtaagtttgattcgatttataaaaaatagatgtaatatttatatttttaaataaatttattataaaattagattaattttttttcgatgatactaattatgtaatataatatttatatttattaatataaatttagttaaaattattttttataaaacaagaacaacagttatttcaggatgaagaaagtatatgtatatatatactaaatagaattaatataaggccataatatttgtcacaactaataaattatctcttatgattttgtatcgaacgtaggcatgtggatctgatattcacattgaaggacgtggacgtataatcttcgagtatagtgattcatactagacgcggatgataagtttgagtgacatgcgaaatattgtagggcacaatctaatctaatatattaaaattggactacctgtttattatcactagacataagctttttttcaacttgtatatctatgagctattctaacttgtatgagtatgaattaggatttagggttatgcatttagtatctctaatactctaccatttgcagagaagtctagcgataaggaagagaagactgccagccccactgatgacagcaacaaataagtcctagcacaaacttctcttttgaatttcgcaaccaggagatatcaaacctgacaaactataaaggcatgatagttatcattagagaagtagtcatccaagacgagggagggcgtagatacttgtacaaatccgtcttgctgctgttgattctcgcaaacaactttaacttagagtctaattgatagagctccaacaactctgtaacaaacatctctagatctaccttttcaaagtcaaactcctcgagctccatgtagatccaccatagagcagctccataaaatctatagatattatctgatccatggattccctaaaacactagttacacatataatagtttgtttctttttctctctcctgccttgtttagttcatctcaaaatccaaaaacttttcaagattctccatcacatcgaatcttgcagcacatgcatagagcattaaatatagataaaaaataactaattgcacagtttatctgtagtttgcgagacgaatcttttaaacctagttaatccatagttggacaataattatcaaatacaatgaaaatgctaaagtgtcaaaatccaaaaaaattttggatctaaacaaggccttcttttttcatatgtatgtggactcatgacttatattcataacagttaggaaaactcatgtctagtgatgataaatatagagtctaatccaccatatatcaggtggtgccctataaattttttatatatgccatccttgcttatgagttagaacaacttgtatttagcgatggtacgaagtttgattcctatacgcattggctttcgctacaatgaacgtatatggttgctagcaattactcataggacttaagagatctaaagtcttcatatacattcttttgaagaaatatatggtcgtttctacaaataaagttacacatggtagaggattaaaatccgttgtagtctagctggttaggatactcggctctcacccgagagacccgggttcgagtcccggcaacggaataacattttgttttttttgtctttcgactctaacgtctaaccctttttttaatgaacaattaaattaacaatgccagtcgtgggccaacgaacaatacacaggcccaataaaggcccaactgtgccttcccttccctcgtcagccctccacactccacactccacagccgccgcaccgccggccaaccaatccggcaatccccctcccggccactgctccggccaccgattccgcgtgcccgccccctacccccgccccgtctacctcccttatttaaacgcttcccgtttcccgcgtgctgcgcgacgcgaaccggaaccgctgcttgccttctcggtccattctaccccgcatccatggcggaggaggcggccgcgacgttggccggcggcgacaagctcatcctgcggggcctgcagttccacggcttccacggagtcctgaaggaggagcagacgctgggacagaagttcgtcgtcgacatcgacgcctggatggacctcgccgccgccggcgagtccgacagcatcgctgacaccgtcagctacaccgacatctacgggtgagtagtcctatgtcagccttaacgatgattgattggaacaacaaattggtagaaattagcattcttttcggaatttcaactggtatacttactagagtggcacgaggtcatcgtttatgtatgcagtttccctgatttcagtccgtagtaatctcctctagaaaagagtagcgaatcttcttgtttcaggatgaatcacgatgctgtttcagaggtctgcttggaaattgttgttattacgaaatgatatttttcagaggtcctgcttccgaactcagattacactctgcacttgctttggggaggacatacatacacttcagagtcccaacatagtttataaacacgttttttcagattttcttatcatagagtccaaacatagtttctaaacatgttgtttcaagtatgtttttacctgccccacctcacgtcattgctctacaattctagatgctgttttttagttacactttgatttgcagttgggtacttggaactaagctggggatttgggtttgccatgatctgcatttctgcaatatagcatatttagactagcatagtgttacgggtggcctatgtgtctctgaattattgttttgaaaatttcagtttgtagcagactggggatttttatacattacaggtggcattagggacatcatatattcagctatttcttttggtcatttaccaccctctaagaaactctaattgtttatctcctcaacacactatgtaatgtatgttctgacttctgaatggaactgttatcaatcaggtcttagatttggttaggccttctttgcctgctctgggagggtgtagatttgtagacacacacacttcagagtcattttgcaaaatggacactgtaggtctgtagcactttcatttgtgtttgacaaatattgtccaaatatgaactaactaagctcaaaagatttgtctcgtaaattacagacaaactgtgtaattatttatttatttaatctatatttaatgctcgatgtatgtgccgcaagattcgatgtgacggggaatttgaaaaattttgcaaaatttgtgaggaactaaacaaggcccaagaatcctttcccaaaatgttttatcagatcccctgacaatcagttttgtttaacccccctcccccagcattgctaaggatgtcatcgaaggcacgccacacaacctcttggagtcggtggctcactcgatcgcaaaggccacgctgctcaagttccctcagatctccgcggtccgagtgaaggttggcaagccacatgtcgcagtgcaaggcgtcctggactatctgggcgtggagataatgaggcacagaaagaaagaatgagatgttatacttatacacatgtgccatgtggtgatgggcagccagtttaatgttgatgatggtactgcagctgtaaccataatccacacttgttggcaatttaccctgtcgaacacaacttggcatcatgtttgatgaacaagagaatttgacagtgacactgactgtgtgagctgagatgggaatattgtttcccgcttgcatgcatttgcagcttatatagctcaaataaaggtttatgggcaatttcctgtgaagcctgccatggtagacagtaaaaaaataaagcctgcatggtatgggatcaatttgttgtgtccctgccccagtttgtactggtacgagtgcatctgacatacgctgatgtgcagttttttttttttgacgagagctgatgtgcagttgatttacagatactttttggtagacgaagagtactgattgtacgaaactgtttgtgtgaactgaactgtcattcaggtacggaacgtggcgcacaatgtcccattagagcctgtttgttgatttgaaaagctatagttggctgttcgttgatttatcgtgagaaaaaaatactaatatctagcaaaaaaaaaaagtatggcttataagcgagctttctcaatagcgcatttatcctttttcaaaaccacccaaactactactaccatacccttaccccaccaagaattaatttatgaaaatatttaaaggggacttttttctacttttagacagctttagcctcctctt

SEQ ID NO: 4816 - DNA, 5133 bp, Sorghum bicolor
atcacgagacgaatcttttgattctagttagtccatgattgaataatatttgtcacaaacaaacgaaagtgctacagtaccgaaaacttttcacttttcggaactaaacaaggccttatcattttttgtcttgtttaattccgaaaatatttcggatttcgacactgtagcacttttgtttttatttgataaatattatctaataatggactaactagactcaaaagatttatctcgtgatttacagtcaaactgtgtaattagtttttgtttttgtctatatttagtactttatgcatgtgtcttaagattcgatgtgacagaaaatcttaaaaattgtttgtatttcagggtgaactaggcctttgaacttgatccccgccggctggctgggcggtggctccgccactgatcagatgacacgcttttgctctgtcaaccgacgtacctctactgtacatacctaaagagtacaggtcgacagctacgtggattagcgttattgcgtggtggtggccgtggcaggcgcagcagcagcagcatgtgcgataaatgcgtatggtacttgcgtgcgcctgagccgatgaaaaatttaggagttaatttattacgaaagaaaaatactattaactaacagaaaaaatatatctgaaaaaaagaaaatagactaataattactgcttaattatgaattaattgtatttaaaaaatttggcttgtaaaatataaggtatgtaattaattgtttttgtaatttaaatttaatgttgtatgtattggtaaaaagtttttagattgaaactaaactttgtttttggaaataaaagagcgaagacaaattctgacgtgaaggcaggcatgcatgcatgcacgggcagcacggctctgcagctttctcctctgccgctagcaatgcaaagcgtggggtcattcggcggcccactccggtggtcagccgcagaacccgtttcggttattcgcatttggcaaggtccaaagtcccaattccagccaacttacggcctctgctggttggtgctatttcctttccttgagcgtctctaacgctagtttgcaaataattagagacataataataataataataataataataataataataataataataataataataataataataaaataaccacggttattaatcttttttcttaaaactcttcttagactatctatttaagaaccattggagacacctttattaccgtatcctatgaaagaatacggttctcatcatctactttgctatgtacttatttaagtatgaaatttcagcaaaagttttgttaaaactgaaaaaaaaaacgaggaagtactttcagtatgcagtggtggcgtatggtacagggaataaggattgagcgcggtcgagtcgagtcgctggtcgcgcggagaaacgtttcgtatcgtcgcagagcaatgccgcgcgtttaagctgccgccgcactcacaacaatcgcatggcatgcccccacgttgtaaagcgcagtcagctagtagtacccatccacacgtaccgttgctgcgcctgttttgtgttgcacatttctccacccattctattctatattctataaaacactgtcttgttttgtttttctttttttttctctttgaattttgaaaaaaaaaacgtacggttaacacgacagtacatcagcagtatattggcctgtaaatcacagcaactagagccggccggtggcccgtcttctgatgggccttacacgtgcagccatccgtgcactcgggatgggccctacggcccagcccctcttcgacgagatcccccatcctctttaaatgctctcatcactcccgcacggccccaccgcccagctgcctgcctgtgcggcggggcccgcctcccggcctcgtggaccccgccgcccgtcgatactaccgatgcgcgcggccgcggcgccaccaccccggcgtgtataaagcgctcgctccggccaaaggccactctgctccaactccaacctacccagcagcggccaggccagccacctccccccgtcgctctcacgctcttcgtgcccgccgcctcctcccctctccgtgcccgtctgaccaacatggcctccatcgccggatcttccgccctctccttcgccaggcccgtcaaggtaactatgctcagatccgagtgccacctgctgctgttcgttgtccgcccgtcggtctctctctagatcctgcctgcctaccgcgtccctcgcagggtttggggcgggggctttgataaggtttcctgcctctgattcctgcgcgtgatctagagagaccctcgtccctcggcgtgattttgcactcgtggtgaactgaagaactggtgacctcaccactgcgagagcatgtgttggattaacggctgggtctaagccttttttttttggggttttattatggggaaagcgtagctttatgggtgtctatggcttcgttgagcccggttctaaaggggatttgtgcagatctgctctcatgcaaagttgatgatctttcacaaatgggttccgtgatgggatcgctaagaattttctttgcacgtacatgaagaatttcatttcatttatgtaaccatacgttgctcttacaaccttagatcatggtgtactgcacataaccacataatgattgatgcgttcatctttgaatttcactaataatattttagtatttttgattctggatgtcccttcaatcgaaggggacaaaagtgttgcaatcctagcactagatttcatagccttgattttggtcacacgacaggtcaaatattcattcttcttcaagctccttaattaactgcactcccttgaattgcaggcaatcaacacgaattctctagctttctccccagtgaagaagggtaacacattcctccgcctgcaaccagtgcctatgagatctgtttcctgcgctgtaagtttcgtacttgaccttacaatacacaatacatttagtgaggtttgttatcataacaaagctagtgaatttctagagttactgcttctgtgcattattgcgacaaagctattgacttcctaatctgccgtgtctgtggatctcaactgaactagtaatctatactaagagtcaggaatcaccaaagttccttattgtttagagtgttttcttcccttgcctttgttctggaattcaaggaaaaaaatggttctacttatatttgctcctagtgttgttgcattgctcttgatctagcaagatagccatacttccagtgacaccttttttttcaatgtatatttgcttaaactgcaaacataatgacatttcaaattatggattgtgacaggccaagaaggatacagtggacaaggtttgtgaaattgtaaagaagcagcttgctcttcctgacaacactgatgtttgtggtgaatccaaattctctgaacttggcgcggattcactggacacggtaaatcacaacatttcttgctgatgccatctatagtcactttttaaatgattttgtgatggaaatgtgtgattgttaaatccttcaatttatacgttagcctaatgcaactacattgtaccatttttttatttttcctgaacatagactgcaaactgtatgtagcctatgacctatccacttcatacttcggaactttgttgataagccatgactggaagtgtttgttgatttattgtgagagaaaaacactgctgaatggctggcagattccacactaatgcagattccacactccttcagaatattgtcagtcagtctgtaattttttattacctataaggaccagagaagctcttcgaaagaatgttatgctagtatcacagataatgtatactccctcccacccaggatgaatcaacttctagagttgtcaaaactcaaatatttcttaagtttgaccaattttatacaaaaatgtactaacatctctaacaacaaaaaagcataacatggaaatatatttcattttgtatctaactatactaattttgtgtcataaatatcaaacttttttctatcaaattcagccaaacttgataaaaaaaagtagacttaggataactctagaaatggatttattcaggcttgagggaggggatctaatttgatagatggaatggcttgctcttttggatattttttttctgaagattttactaaatgtccttccaaattcgtcacaggttgagattgtgatgggcctcgaggagcacttcgacattagcgtggaggagtccagcgcgcagacaatcgcaaccgttgaagatgcggctgacctcatcgacaagcttgttgctgggaaggcatagatctgtatctcctaccattgtcctaccactctatgtctctccatttgatctaggtttctgtggtctgaagacttggtgattttctccgcactgctgttgttatgcccgtgtggtaataatacgagatgttttattaagcggttgaacattacggtggtgtaatctgttactgctaaggtgcattgttgtatgaattgtttctccctcagaagaagaatcacacaatccgggattctacgatgactgaaagtatggtactaaaaagttatggctactgttgaatgattgttgataagttaagtgaacataatatggcagagtacttttttatataggaaaccaggctgactacatatttttttagatggaaacagctccattaatcaacaagaaaaatcatcggttacatgaggtacaagttgtgggcaatcttttatacgagaataaaacttacaaaatcgaaagccattcttatccccataaacaacggccccaattcagctctggggtaaacaatgcgagcgccgagcagcagattctgtgcaacagtttcagtcatcacccagattctgtgcatcagtttcgatcatcacccgttgcatacccagggtccaggaagatttgtcacccgttgcacttgcataccccatacaggaaggttgtcagttcgaggcaaaaaggatgcaattttatgacttgtaaatatattccataatttatcgaactcccatttgtagatgccaaacataccacaatatttttgcttaatcaaatcctaaattt

SEQ ID NO: 4817 - DNA, 4439 bp, Sorghum bicolor
ggacttggaatgcagccattacatgaagaacttcgacgttgggcatgtgcctttgagggtagcaaaggctaagcaactacttgggaccatcaacaacaactttggaacactcgcattttgccgccggtacttggaccgccttggcgagacaaaatacctcctggctctgaaaaatctttgtgatagtggtatcattcaggtatgtgaaaagctccatctcgacccccattgtctgaaccctgttgcggacatcgttattcactgcctcctgctctgttcgtgcttcgcagccgtatcctccattgtgcgacgtgaaagggagctatgtctcgcagtttgagcacaccatcttactccggccgacctgtaaagaggtcatatcgagaggcgacgactactgattgctgctgaacaggctcctgctgtactgggttgtttatgctaaagagtacacaccgtttttttgcacaacctgtgtggctatgtccatctgttttatggaccatatgatatgtcatagtccaacaaataatttggcactattgctctgatatttgagtttggaatatgtggaagcgtgttcttttttcctagcaaaaaatgaatcgtactgcattctctctctagtatatatgattagcatttgtctgtcgtggttgtgttctcccgttgctcttttggatgtgctactgctaacttcaagtggctagtttatccacaacaatctggatacaaaatcgaaccatgcaatctaattgaagcttctataaaaaaattataactagtgtgaacgaaaccggggccaaaaagaaaaaccacgacaagttaaataatggaaaaactctactttttctcttccaacttttacaaaagttcacttttcctttctcaactccaaaactaagcaaatcacctccctcaacttttcaaaccatgcattttactttcttggagcggttttgaaggtagttttttcaacttttcaaaccatgcattttaccttcttggagcggtttcaaaggcggttttgctacagtcaatagtgattttgctacagtaagtaaggttttgtcttttttttttaaaaaaaattatttcggttgaatctttgaaaaatcatagtaaattgtagaaaaatcataaaatagaaaatctaatttttttgactccacataagtagatctatatattaaatatataatatgatatgctttagtataaagtttttgctttaaaggttttgtccttttcttttatttatttatttggctgaatctttaaaaaaaatatagaaaaccataaaacagaaaatataattttcttatactccacatgagtatatatatacataattaacatataatatatgtatgttttattctgacaaaataattatagaagctgcagctatgaattatttcaattaattacaaaaaacatagatctaaagctacaacaaaagaattatactaaagtataccatattatatatttactaacaaaattaaattttatattttatgatttttctgtaatttactttgattttttgaaatatttagccgaaataaataaaaaagacaaagacaaaacctttatagcaaaatctttgtactaaagcatatcatattatatgtttattgtatagatctacttatgtagaatccagcttaggaaggtgttttgttctattttagagttgagggaggaaaaatggactttcgtaaaatttggggggaaaagtagactttttccttaaataatttgctgctagataggaaggaactcgagcaatatttctaggcgcaaattcaacgacgatatagcccaaataggcccaattgggcccatcccgatacggccttccacagtgggagagccctcgacctacaggccccacctgcagcgagcgaggacgtgggcatttccggaatggctccctgtctagggttttatctgcgtgccctatataataatctcccctcccgctccgccgccgcctcctgcattccttcttcccgttggatcccagccgccgccgcgagacgaagagctgagctcggcgactcccaggtctcgcgagaagatggtaactatccctcgagtcccttctccttcccttctcctcggtcctggatacggcactggcccatcagttcgtctcatccatgttctgtaaccgcgtcatgagttgttgctgggttgcaagttgcttgtccggctgtataggcgatgaaagttttctagacggcgttcttgctgtgaccttttagtggattattattgtgcaagagattagtcggattaggtctttgtatccctggttgattgacgggcccaagcaatgttactgctctggttttgtaaaatctctgtgtaagttgcatgctgttgtggattagtattagctgtatcctaggctgagttgctgcgagcatggaaagcttataattccagttactgaattgtattttggtgtcaccgtgattatgccagtttatcacttttatgctatgcttgagctgattactataattttggtgccattatgctttttataactgcacagtagctataagaattcgaaatgtattaacatgtgatattgtaaaaaagacccaccattgtagctccaattgtatataaactaacattgtatgttagcatagcatgtatgtgggtatttgttttcgtagtagtggcaatgaatttttcttttttgccatcctgttcgtattttgtagttcattgtctagtgtcaacctatctctttgctttgtctaatcgtttgtgaaataaatctgcagccgaagcaaatccacgagatcaaggacttccttctcaccgcgaggaggaaggatgcccgttcagtgaagatcaagaggagcaaggatgttgtcaagttcaaggttcgctgctccaagtacttgtacaccctctgcgtctttgatgctgagaaggcaaacaagttgaagcaatcacttcccccaggttagcacagctttaattgacatgatattgtttctgttctggtatacgaaaactccattctggttgtaatattgccttgaattacccacactgctgatcgtctatttggttatttatttctgttggattgatgtcatttgctttgtttgaagtatctgtgtcagttagttgtcccagtgaagataaaatttcggtccaaagatggttgaagactggttttagcttcaagccatctgacatgtcttcttgattagtgggtgacttgtggctaaaaccaattttaagaaccatccatgatggccaataatagctatgagatccgagggacttgtatgatctgtttcttcatcagctttcactctgaacaaagttcattgttttgtttttgtttgtgttttctatttgacgaggctgtgtcccattgaagattataatatttgaccatagatgaatgattgattagttttagcttcaagcctttgttgtctctactctttggcatataggcttgtggttaaaaccagtcgattctaagttcattgatgatgggtaatagctatgagatctgagggacaagattatctggcgcttattgatctgtgtcctaaatgtgcttgtatctttggtcatctgttttgtgattaccgattcccttttaattgttgccaaccctgttcattttgatctgtcgaatgaagtctcacatttaaagcacgaatccgccatgaagttctgctttttgactactcaatgtccattggtgcaggtttgagcgtccaggaggtttgattggatacatgacaaagtcaagatgaactaccaaagcatctttatcagtagcagagcatgttattctatgtaattttggaacctaagctattagacctgtcagtgttggatttgtggatcttgaatttttggagaaatgccaatttacctcgttcaacgatgcaccgtgaagtttgtttctgatttgactgcacgttaattcagatttatgtctgtgccccttccatcatacgtttcctctgcaaacgtagctactggattcttgtggttttatatgatgaaatttgtgggggatgcttcaggtttcctgtcctcttggaaaatctcgtctcgtcacggtttggcatgtgcctagaaaagcaaggcctgataacttacgctaaatattattgagctgttttataatgatgatcacagaacttgcctgttgaaaaatctttttaattaagaactcaatacttttaaggccttgtttagtttgtaaaaattttggttttgggctactgtagtactttcgttttatttgataaacattgtccaatcatagagtaattaggctcaaaagattcatcttacaaattacgggtaaactatgtagtttttatttttgtctctatatttaatgtgcatgcgaccaaagattcgatataacggaaaat

SEQ ID NO: 4818 - DNA, 4694 bp, Sorghum bicolor
atatcatctatcatgcacagattttttttttgaaaattaaataattttaaattaaaactcaacttgtacatagagacaataaaagaaagcttgttaagaggcaaatgaaccaactgaaataattggaaggtaaaccgatccatacgttagtttagggggtttggatatataggctaaacttgggtgagtaatttagacaattttcctttttagtagtagtagatgtacgtaattcaaataaggccttgttcagttcacctaaaaacccaaaatttttcaagattccctatcgcatcgaatcttgcgacacatgtatagagcattaaatataaatgaaaataaaaactaattacacagtttgcctgtaaaccgcaagatgaatcttttgagtctagttactgtatgattggacaatgtttgtcaaataaaaacgaaagtgctacagtacccaaaccaaaagtttttgcgaactaaacaaggcgtaactttaggtaagttcctcatttcgtaatggcatacgtgaattatatagaatatagatgtaggctgttactttaatgttttaatataattgtatagattctgttcacttgttttataagccataatttttctgtcagctagcagtgtttttctttcataataaatcagcaaacagtattttcagccgtgacttttcatatcagcgaacaggtatataggtaattatttagaaacataatatatttaatctgagtctaacgaattaataatagtagaatatttctgatttatatgtaaaccgatagagtgtatattttttccatagtgcatatcacgagactttaggccctgtttgcattggtagagctccatgcggctctaggagttgtttttattttttctatcaaaataaattaagagccaatgaagtcactatttttttgtttcactagctttggctccttcacgcactatagtaagaagaagtcggagttataccaaacaggactttagtaaaaaaaaagttttcaatttttttaagaaataagagggtagagcccctgctaaataaattaattaaaaggtaaagtgatacaaataaatacagaaaataggaagagcaagaggaggaaaaaagatgcaaaacagatagaagaagagttacaagaaactttctatccatgagaataaagacggttaattttctcttgaccctatgcaacaacagagccaatttcttgaaaaagtttgacttgcactttgcgacgctaggttgaatacatttaaaagataagatcatttctactcatttaaagataaaatcatttcttttggtccaaatgcaccagcagaggaggatgaatatgtccatggaaaatggtcggttaagttgtgtcttgagggattgtggcagctagaaatctatggcattgcagcaaataggcagtgaacgaggtgttccaggatttgctcagggcaacagctgcatatgttttttcttctaaatatatttcttgtgcttaggctgataaaaggatttccagagcaaagtaaaaactgggtgaacctcaggccttgattgttgagaagggcactaatgtatctccgtcttaattcttgttgtcaaactttcttaaatttacccctttgtaatctaaaaaccgttgttgttttaataaatttactgcaggggctacggcccttccagtttcgtcaaaaaaaattatattgaaatgttagcaatattttaaataaaattattatgaaaaatatttagctattaaaaaaaattatgtattataaatattaaaaaaaattatgtatttagtcaaagttaaaaaaatatttttcagaaagtgaaaatgaaacttgctggcactgggacgggcatggacggagaccaacgcgagattctggtcgccacggttggcagttggcaggcagcgagtggtggagtggagaccgccaactctctatccacttttgagacctccccttccttccactctcgccccaccgctttcctctgtcctctcctctcctctccccgctgtccatggctgcagcagcgtcctcctctgcctcgccgctcctcctcccctcaggtatcttctttcgttgcaatctgagcccactccgtccgttgctgatgaatgcgctgcctgtccacagggccgaggcatgcgtcggcctcggcgacggcgtggcttcgcggcgccagcgcgttcaggagcagggcgctgacctcagaggcgccgtgctgctgcaaggccgccggtgtcggtggaagcgcggcgcaatgcggggcggctgacgagttcttgatcggtggtggcagcagtacccggagggggatggtaggagtggccctgggagcctctgccttggggctggcagcgtttgacgcggtcgccgccgggttgccgccggaggagaagcccaagctctgcgacgccgcctgcgaaaccgagctcgaaaatgtaggttgactggttgagttacagcgtgtgtaaattcttggatttcagttgactggttagaaaacacaatagcattaataaggtgctggtttcagaaaattggattggattggattggattggatacctgccttcctgaattagttagtaattcctttcattttgtgcagtttgaacgctaaatctgaatccgaattacctaatgttatctaggtgcctatggtaactacagaatccggtctgcaatacaaggatatcaaagtgggcgaagggccaagtccacccattggtttccaggttgctcaagtgatcactttgttgtcacatgtcaaatgtactctgctgtttttactagccatatactcacagattgtttcacttcttgccatgtaggttgctgcaaattatgttgctatggtgccaaatgggcagattttcgacaggtgagatttgaagaactgatatgtgaccttcagctaaagggcggccacaattttattaggagaaaaaataaaaataaaaacaaatactactcaagtttacaagcaatttatttacaaaagacacataaatgtacctggtgtcctattcacagatcaggacttgcaaacttagaaattgttctttgagcattttgtttatgaagccattccagtttttattgtgctttgctgctttgtgcagttcactggagaaaggtcagccctacatattccgtgttggatcaggacaggtattaatgtctgcatgttcggtttgatgtccatgttctgaaatatatcatcataaattggatctagtgattcaagaataaattgatttgaatatgaaatcgatgttgcttgcacttctcagcttcatgtctatcaatgcatcagttgactaagatacattggcaaaaacaagaaacaaactggaaagacaattttcagttcaagtagaagttttagtatgtgctttatttttgtttattactaactcacatctatttgtcaacatcaggtgattaaggggcttgatgaagggattttgtcaatgaaggttggaggactacgtcggttgtacatacctggtccagtaagtagtactccctccatcccgaaaaaagatgcaattccaaaataatgctcagtctgaaaatttgactaaatttatgtaaaaaatattaatgcttatcatactaaataaaaacaattagatttttcatggaatatatttttatcatatacctgtttggagccttaaatgattatactagtttcgataaacttagtcagacttaagttagtttgactctgactaaacctagaattgcatcatttcaaggttgtaggtagtaaaaaaaagatctcaactatatatagttgaaaacgaaagtagacaaggcagcaatctgataaatagtttcttgttctgaagatttgaacagaacagtgatgattttccttttcttgatcatgaacagttagcgtttcctaagggtcttacttcagcacctggaaggccaagagtacctccgagcagccctgttgttttcgatgtcaatttactgtacataccaggtctcgatgatgagtgaagcattcgtggcgacagtctttttttttttggtatactccaagagcaacatactgtacatgtagagcaacaattctttccggctataaagtgtatgaagtatccatgttaaggacatagtgaactctcgaaaattggagtattttttagatctagatttttctgttcaaaatggttaaaaaaatacatcatctgattgcccatctcccctgtcgccaccttcagccgctgcagctctggtttcagggtcttgttcagagctgcaacagggtagtgttgttcattcacttgtgtccccagaacaaaatctaagcattgctgcgatttggcagaatgaaagagaacgtgtggcaaagcagttagtgtgatgttgagcattattttccatcttttaggtggacttgttgcactgtgttctgcagacatatcttcagttcgctgttctcagctgtgagaccagctgtgtctctctgtttgtattagcatataggaaggagcaacgattagctgtattaatgagaaattaacatgaactcaaaagaatacatgaagggaaaaaaatcttatacatcgcatccgattcaggctagggaaaagattatttgattctgctatgctgtacttatacatcgcatccgattcaggctagggaaa

SEQ ID NO: 4819 - DNA, 5872 bp, Sorghum bicolor
ctaaatttaaggtctaagattattctctaagagctgaagtgactaattatgacatctcctacttaggtaacacctgatagacatttgctttagttatttacacatttcatcactataaaccaaactatgcaaacctacatggagaacagctaacaaatttcacagttggcatctaaactttgcatgatagccagagctaagcccccataaacttgaaaaactaggttctcagctccttaatttgcttatatgtgcaaagtataatattactcagctaacaaaactacagcaagtggtccaatcagaattagctaatgatccgataatcaagaagatctggcttaataagagttaacagaaaactgaatctaactttcaagttcttataggtcgcagggtaggacaacagtcaaagctaagggagcaggttctctgccagatacgttcagagtgtgtttgcaaatttcaaaatcactcacactaagtgcctctgcctaaagtatatataatattacagcaatatgatttacggacataaaccctatggatgatgaacaccttatagataacacagtaaccaataaagcattttaccactagttcaatggatacaaacactaagaatctaattcactgaactaacaacaaattttgtgcaactagttcacctctgatcaaaaagtaaaatttgaaatctacctccagtcatcatctagcaggctagcacacaaagctgaacaaaccaagaccacaatattcagaacctagcgcagctaagctggaaaaaataaaatcttaatcggccatcgctaaccaaaacgagaatgctcagaaccaagtcaaaacacctcgccctgctcagaacctagtcaatcaccccgctcccttaacgatgcctcctgagtggcttcagatacaacaaacactgattgcataacgagacagtgctacaggtacaaacaaattgaccatcccctacactgcacatgaagctataacacagaaaattacagcagcacatcagaccgccatgaatccatgtccgaccactgcaacgaatcggtgcccgcgaaatcaacagccgcatgcccagataaaagcagaactcgggccttagatgacgacgacgacgacgacgacgacgcacgcccgccgataacgcatcacgattcagagcgggaggaacaggttctcacctgaaggaatcgctgcatctcggggttgtccatgtcgcctccgtctgcttctctctccccccctaaaaccctagctcggtttggtttttgcttgcagaaggggatgggggacgccgcccggcggcggctagtacaagtatactactccttccgtcccaaaataagtgtcgtttgcgcttcctgaaaaataactttaactaaatatatagtaaaaaatattaatatttatattatataattagtattattggaaagatctttaagtctagttttttaacaaatttatttagagatataaatattgcacacattttctataaattgagtcaaagttgtagcacgaaaacctaaaacgacactctttttgggacggagggagtacttgtgatgctgacgtcacgatgggatgaaagatgaactctctccgttctccctcactgggcctgaaaatcttttcgacccacccagcagtacggcccaattagatttggttctgggccgtcctcaaacgctactaggcctttacggggccacaacccacccagctggagttcagactccacagacgccaggaagaatattctgtcagttgaaacggaatatgccttccgaataaacccgcgccgcggcggaacattccgcgagccgtctctctcgtcgctccgcccgcccccggcggcggcggttgcgggtcacggtcaacccggtctaaaaatattcaaacaaaagtattcggacaccagcgttgccaaatctggaaacgtgcgcgacgcgtcggggcggggcggggacgcccgagccaaaatggcgctcccgggctcggcgggaacccgcgcggcggtcggcctctgccggatcgcggcgagcgcgtcctcgtcagcggcggccggactctgccggatcgcggcgagcgcgtcgtcgccttcgccgtctgcggcggccggcgggaggagggaatgggagctgccgttcgcgctggtggcggagcgggggatggtggtgggcggccaccgcgggatggggatgaacgcggtgggggcgccgccaggggcgcgcgtcggggccgccagggagcgggagaacacgctgctctccttcggccgcgccgccgcgcacgccgccgtcgccttcgtcgagttcgacgtgcaggtgcgcctcgctgtctcgtttgggaccttgttcgggtttggattggaattcgcagttacaccacagcattgcgatgcgacaatggtacagtaattgctaggtagtggcctagtgcggtcgataaaaaatgttggcggctgggccctccccgttccgtcgaaataatggaaacgcgtgctctagtggatgcaacttgccaccgccacctaaaattggttgcgaccttcatgactattctccatttgggatttgggacttggatgttgtgtatatgtagcatatagttgcagtgcattactcatataaaagcaaaataaaagcaagcaaataagtaaacatgtgatagagtatatttttttcaaaccggaggtatccccatttccattagagctaacggaaaatacagaagttgccagagtgtttcagaagatacagagaatgtgctggagtatatacaaagatttctggctagtcaaataaaaccaagcaataagcaaacatgtgctggactggattgtgaaactgattagtttgtgttgcaatctggcaatgtgtgagcaaattgcgacttctgttcgagtcaatgatgatgatgatggactgacctgtaaatgttctcttgtgctgaagttctgcatcgggcaagtgtcaagatttgaagctgttgattgtcaaatacacatatactagaggtgtttctgtttaaatacttgtagtacttaccactaatctggtggtcaaagcctcaaatgtatgattagttagagcattctcaacggcaagcacctgccaaaataagtatgggcagttgatagaagcatatgtgttttggctgcgtgttatttgcctttttccattttaagattttatatgagtgcagttcacctgattgattcctcttgaacagtttgcaatccgtgacgttgtccatgttatctctgaagtctgagtttgtgagaccagactgatctgttgaagaaaccattaatctcgccacctcgtttacaggtcactaaagatggctgcccaataatcttccatgatgacttcatcctaacacaggggattgtatgtttttttacccatcctttgtttctgtactatcttgttcatctattgtagggggaaaactctttagttaaagctgattgttgttgcatatagggagctgtatatgaaaggcgtgttactgatcttctcttggaagatttcctctcttatggtacacaaaaagaatctcgcaaggtgtcataccttcttgctatttattttcatgcaaagtccatgcatgcatgctcagggcactcatatattcactgtcctttgcattggcctttcaggtttccaagcctttacttagacgggcaggagatggtagagtccttaattggagtacagaagaagatgattctctttgcacattgcaagaggtctttcaacgtgtcagtcctcgcctgggatttaacattgagctgaagtttgatgacagcattgcgtatcacaggaaagaccttgactgtgctcttaaagctgtattgcaagtacagtcttttcccctacttcatatagtgcttagtacagtatcaattgatcagtctattcacatccatttcagcactaagaggtgatgattgatgtcaataagggtgtcgaatcattttggcaggttgttttccagtatgctaggaacagaccagtctttttctcatctttccatcctgatgcggcacagatgatgcgggaactccagagcttatatcctgtaatctttgaaacttctgttttgtgcctgaaactttgaattgcttgtcaggtttcatcaatctgtactctagctagtattgcaatggttatgaaattcattcataggcaaacttccagtcagtatttagcacatgcacatcaacttttcaagacacaatctgattgtgaacacgcttgcattatagtattctgaatgcaccagctagttaccttatctttaggtagttgcaaatcgataatactatatgtaaaatctgaacaaatctctgctgatatttgattgtatgtaatttagatccactgttgtgtatgatggaattactcttcaataaaattttgctatgcatttttttaagtatgagtgaatatgccatctttcccccattaacataagcttttaggttgtatctagttcgagtcttggcaggctcaattaaataaataattgcagtcgagtcctatttccacgtttgagtaaatgaggttttgggctgaactggacaacatcatactagatacatctcaatctcaacattcagagtcatctccatccttttcctattttgcattaggtacttttttttaacatgaggttttgtgctgaattggagaacatcaatactagatacatctcgacattcagaataaccatctccacccttttccatattttgcattaggtacttttcttaactttgagaataatcatctacatctttttctctattttgcattaggtacttttcctaacagaaggagggacatacaaacaccatgattcaagaaggaactcacttgacgatgccatccgggtatgcctagagtatgatctgcatgggatcgtgtcagacgtgagaggcgttctcaagaacccatctgcagttatcagagcacaagaatctaaccttgcacttctcacatatggggagctaaagtaagcagcatatcgttatcgcgtctcttgtgtcagtcaaccattgcatgttcgtcaatcatcttacagccttcctatgaatcttgcttgcataaattctcagtaacgtgtcggaggcagtctatgtccaatacctgatgggtgtacatggcgtcattgttgatcgggtggaggagatctcaaacgctgtggcgggtttcggtaaaccagacctcggccagagtggtgctggtgtggacggaggcggagcaaagcatcaggccttctcacaacagcagctggggttcttgctccggcttatccctgaactgattgaacagcaacattgaaggtacaccatatatacccaagtggcatcccagttttggccctcgaagagggtcagttgttgtcctgactgataggtccagtttgacagttttaggaggtatacttgtgctgagtgcatgcatacacgattctgtacagtccaaaactcggttcgtgttggtaccgtggtcgatcttgttgcaagtaggttcaccaaaaggttgagcaatgtactgttggaaatttacaagattgtaattcggatatcccgttcttgccggggtatctgtcttggttttcatgttggtagtttagcacagcaatgttgcccatgaggccgtgaccacatccatttcgggcaacggccttattatatcaggcttcggaatgcaaagaaaacaagaacaagaacatgcatatctgcagtcgctttctcttgagtcctaaggaactggagtcctggagctctgcacgagctctgctcgaccacatgtccagcgatcagagtcatacactgcct

SEQ ID NO: 4820 - DNA, 7382 bp, Sorghum bicolor
tgacagctgctttccgacgacgctcgccacctaaaggctttgtgtgtggtttagtagggattagaagagattcaggataattttatcatctacaagtcaaaatctccttcaatcctctcgaagccttgtttggctgtaatcagatcacctcattctatatgtgggttaaggtgaattaaattaaaggtggaatcagtagtgctagctactagtagtcatgaggagcttgtgttagcttgttaggtgcagtgtggtcatgcatggcttcgatctcatgtggccctcaactcaactttctgcatctaccattttcggttatacactggagtaaaaaaaatacccggcaaatgtcaaagccgttttcagagtttactggcagatttagaggagtgaagtgattgcttggccaggctcataatcatactctgacctgaactactattgcatgctaaatcaaagccttaacatccacccctacctgtagtacttttcccctgagatagagaagccagcatcttggttatttttattgtgggggctattttagaatttgcaaagcaaaaagtagactctaacaattgtgttatctgcttttgtaaaataaaaagttggctatcccttgatttttggtggctatatctttttgaagatcttttctattttacaaaatggctaaacaatagcatttagctactaattttagccaagctcttgaagttgctctaaattgtttcggacaggccttgatcacaggttaatctcgacttgttggatgtcatggcccatgggtccatggcagtatggcccactgttaggtgtcagccgacaagttttcaccagcagagaggctaaaggggtacggatcaaccgggattaatgcatgtatccatcttctccaataacaaatggaacacgaagacgatttcttcgtcgataccttattccatctccagccaattttcttggaaaaatcagagcaacgttcgatgctcgataccgatacggcacctgcaagcatctttagattttgttccggattgccagtttccactcccaggctctcagctacctttcttggcaacttgcgatccatgagccgggacatgttatttgcggtaagacgtgacatgccaacaaggcacaaacaacatgatgttaggatgccttgttaccatttatataagcttgaatgcagataagcaacatcgatgctataataaaaggtaaaaccagatatgaacaccctgctttgagctcagaaaaaaattggatgccattgatatcttatgtctcgtggttagaaacaaacatgagcaagaaagcttcaaagttcacagctaacagaagcctctgccgccaacccaaccgtcagggcaagcaagcaagcaagcaattgttctgttactttcagatgtaccagctagtggccaaaaaaagtggcacatcgctctccaaagggtgcacatgtccaatccaataaagctaaataaaagcggcacccattactccagtagagtgcggcttcagctggaagctcagctcacgcctcaagtctccagaattcaatccgctgaagatgcagcgcagccatcagcatgatatagcacactcatctttttgtttcattagtagcacatgaattgaatgaatgaatgaaaaggagaaacgtcttaagagacgagaccttcccaacttttccagaattaattactatcactaaggctactcctattattattgattaaaatttcaagaggccaccagatcagctagagagtagagagagagacccttcttcgcaaagcttcggaccctccgttgcattgcagctctcatggcgacaccaaccaccacaccacaaatatgctacgtgtcttgcaagcaaaaccagcatctaaagcccactcgcagcagcagccaccactgtatttcgcagcttttctgtcatatacacttgctaaatctgtgccctccacggccagctctactaagcatgtaatgtaccgcggacagctgaattcagccaagcaatatctgctctgagtttgtcaggtccttgagatgggatcactcaagatgactgaaaaagctcccggtgctgcactgccagagtcttcatgtgcctacttgcttcaagaactcaaggtacacaaagttttttgaacaaaacatatatatcacgttatgctctagctgaaatgcttactaaactctgcatggtgcttagatgatatgggatgaagttgggcaaaaccaaaatgaaagggaaagaatcctggaagagcttgagcaggagtgccaagaggtttacagaagaaaagtaaatagtgcaaatatgtctcggattcagctgcatcaagcattagctgaatctgaggctgaatttaccaacctgctgctatcccttggagaaagatcattcccaggacgtgtaaacatccaaatcttgcgggtctcatcatttatccatatctaacaagaaacggttggaaactaacctgaaaaccatttctgcagcctgagaaaatggcaggcactctaaaggagcagctgaattccattacacctgccctacaagaaatgcagatgaggaaggaagccagagtaaagcagttcatggaagttcaaactgaaatacacagaattgcttctgaaattgcaggacgcttagggaatgaagctgtcactgtgaatgaagaagatctgtcactaaagaaactcgaggagttccaaagcgaattgcaaagactgaaaagagagaaggtatacatgcatccttcacttgatgataaacatgtactatcataaacattttataacactcctggatctgatttcagaattttattttctccagagtgatcgtctctgcaaagtggaagaatacaaagttctaattcacaattttgcaaaagtaatgggaatggatcctttgaagatacttgctaatgtgcacccaaggttgctagatggaccaaatgagcaacagaccaagaatatcagtgatgacatcctcaacaagctcaatatgactgttcagcagctaaaagaagagaagagcaatagaagggaaaaggtgatctgtcatccttcttggtaacaaccattgtagccagtagcctcatttcacttgatcacagtgacagcatgaaaaacagaggatacattcaggttatataaaagaacctaatagcatacttagttcaagaatagcataaagcaaaatggcataatgcatccagaagatacttcattggtctacttacataatgcatccagaagatacttcattggtctacttacaaaaattatcacctttgaagtttgaacccattaataatgttagcattatcaagttattcttgttcctagttctaacaggaatataccatgtgaatattaaagaaaaagtgagagaatcttgaactgcattaatattattactaaagcaggtattattttgtagctccaaaaccttgtaaaagcattaacaagcttatggaatactctggatactactatggaggagcgccaaccatatgggcaaattaaggtactcgcaatgacttcagtaaatggaatgttaggtcctggaagcctcacacttgagacaattcaacaggtaaagaccagagactaaacttcatatcagatatgaattatgttagacaagtaactgtcttgatgctgatagattattagttttaccatattgaatgaaacaggttgaatctgaagttcagcgtctaaatcagttgaaggcaagcaaaatgaaagagctattcctaaaaaagagagcagaagtcgatgaaatttgcaagaaatcacacatggacatgccttatcaaacagaaatggacaaaataatgaatctgataatgtcaggtgcgttcggcacagttatatgccattatctttgtttcagtgctgaagtatatttaccattctccaatgcgttgactaatataactatttggggaataaatgaacaggagatgtggtccatgatgatctattaaagacaatggatgaatatatatacaaagcaaaagaggaggccacaagccggaaagacataatggataaggttgaaaaatggatggcttcatgtgatgaagagcggtggctagaagaatacagcagggtgcactagctgcctgatgaccatagtcatagacattgccttatctcgaagtatattttttactaagttgattataattttctacaggatgaacgaaggtactcaataagcagaggagcacacaagcacttaaaaagggcagagcgtgctcgaattatagttaacaaaattccaggtatgcatcatatctacagagtaaaatggaaactgaaatgccacatatatttactagaaattgtgcaggcttggtagagcagttaatggccaagacacaattctgggaacaggagagaaacaagatcttctactatgatgaggtgcgaactcattaactgcaaacatatcctgatctgaaatcatcctttcaaaatttggattttaacttgtcataaatatttatcctagactgacctagattgcccgtgttttcttttaaaaaactgtaactagtaacttcttttatggcttcagcccatctttgaactattataaacatgattttatattgctctacaaagaactaaaatttcatacttcagcggtgccaaaatactgaacaaatgtaacaattttggtattgtagtggcacatagaagcattttaaattcgaacctttataatttatggatagagaggctaggtatttttggaagggcagtcactggataaggtggcagcaagtaaacgttaccttcatcaattcaaccttctcctgtaaatgaatcttgtgaatatgcttattttgcaacagcaaactgaataacagaataaattatgtgtgcaacattaaatagaaagtacaaaaaaggtaggccactaaaatcctgaagggaagctgtatggtcatttctcatttcttatagtttgtagttatgctacagcatcattgacaacagcatttttccaaggccatcatctgaggatattaagtacaataacgaatgctccctccattccaaattatagttcactattgctttgtcctaaatcaaatttatcaaacttggacaatttttagacaaatacattaacatctacaagtttcaataaatgcactatcaaggcatatttcatggagaatttaatgaaattaatttgatgttgtagatgtcgggtgcatttttctataacttgatgaaagttagagatttcacttaggacaaatctagtttggaacagaggtattagaatagttggtcttgaaagcaaaagtgacagtgaagagaacatacttgtagactggtgctaagaagtactaaagcaaggcatgaaagaaatggtatcatgttcaaaccggcaaaactatatattccatccctgtacatagaaaaacaaccaagaggcagcttactaggacaaacctattccttagcattaaaacgtggctgcgtaaaaaaaagaattaaaaattattggaggacaatgcatgagggatacatgttgccaaagacaaaatagataagagtataagactacactcgactatcaaaagtcaagcaataccagggcgagagccaaagcaagtgtctatacaagaaaatattaacgaaatgattgtgattctcaaaggaaaattgcaaaatactgcactaccaaacagatcttatgttaccataaaccaataattatttttttaaatagtattctataaatagccatacggacaccacaaagtagtactggtaaataaattaacatatgcagtaattcattcatcataagtaaacattgcacaaacgacctaacaaaaaacactgaggtctgtatttgcatggttaactctttagtctttacctgtaaaaacaaccttcacagcaaatttctggtattggaaccataatttggaacatttcgttaaaaaaatcaaatagacatgaaagtcagctagagtgattatcaagtactgattccaaatgatagaaagtcttaatttcttgaacaaaactactaacataagcttttgcagctcccgcttctggcaatgctgaaagactacatgttcacactcaaagaaaaagaagaagagaaatacaggcaacgggtgagtagttattagtcaactggttgatggtactggtagtcacataatctggctcatacaggggtgctcaaataaggggttgctctagggatttagttcaaagtcgaactaaatcctaaggatttgaactccaacaccccttatccaaacagtatctaagaatagaaacctattatcagtcaggatgacgttgatttcataaacatttgtttacaggagaataaaaagatacagactctacttgtaaagaggcctgagaattcaataatgttaaggcccaacacaagcttcagtcgtccatcaagcagaggcttcaatacgagtcctggctccacatccatctggaccagccaagtttctgccaaagtgcaactgcctgactcagagaactccccagctgaaaaagatatgcgtgcaaaaagaattaggaacagaagtatgcagggcgtgttgggaaataatagaagctgttcaacctctcatgaagataaagcagaagtctcaactgtgaagcaaggcctttcaccaatttaatttaatttttccccactttaaaaatctacggaaatttgtctgcctaacgtgaagttgcaacaacccccttaagctattagaaaagtgaagagaagtatttctgtatgcagcttataccatatttatatatattgatgtatgattcagtaaaatatgttattttagctgttttggaccttcggtgctgaagtactaacagagatcatcaaatgaaaagcacaaaaaggaaaggtgacttaccatgttagcggaacaattctacgatgtctggcagcatatcaatcatttccttgcagagggtgtgaaagacgccaattaagatgtgtacgcccacttctattatgatataaaacctggcaagccaatagtcaatgagagaaccggctaaacataaaaacaaaggaaacactcgtggttccgcccagccataaatggaaatagtttatcatatatcagtcacagtccttccctcatcaggggccacattagtcagttatgcacatcaaggcaagaaatcatacatatgtataatgaatatgaatatcttcaaaccatgcccgattcacataaccactaaccaagctattttacattttttatttcttacgtcctccgtcccaaattataagatgttttggcgtttctagattcatagcttttact

SEQ ID NO: 4821 - DNA, 6385 bp, Sorghum bicolor
tcaaacagattagtgagagtctcattaatcttctcaaacagatgacagcagctctgtgagacaaataccatgcagagacagttgttgcttcagttgttcatttcttttctgtttccccccctctgttcactctttgctgacccctgacctggcttttacgcacaaattcctcctgtagatagcaggttgcaccgaacagaagttcaaatcatgtagaagttttctggtgaagctgcagtctgacatcttaaagtattcatcttgcttaagatgaatttctacaaaactctccatggccaatgcatccgcgggttagacatgatccctcaatgccaatggagagtattcatcgatgacagccttggcacggctcagtgccttccctcacgatcattctcattgtctagttctcggttaaaaaaccaagtatctatgcaggttcccagttcaaagagtttcaatcgtggaaacttttatgtgcctcaaagccgttgaggcttataatgacttgacattgcttggtgatctatgaggctccgcagacactgggaaacacaatgagaccacacttctgatgttattgatcttcagaaagtactatgggcgatggaatttggcatttggtggttcatcagacttgcggatagcagaagtgactgttctaatcccttagactgttcgattactgattgcaacttttggagaatatggctgtgcggtggtactgctgatgctgcttcgtgtgctaaatatgcccaaatgccctgacatttatctccatatgttctcatttagggctcttaccatgtgtttggaagtttcattctcaatcctcatattatttccaacaaaatgtgtgatgagcttatgtatatggactcaggactaaaaaatttcaggactcaggaggcattcaacttgacagaaataccaattacattttcctctgtttgtatcttgtatgactcatgaactaaggaaatgctgactagacaattcagttgtatactgaatatcatcatctaatacttgaggtacaccaaaacttcagtgttactctttattactcccgttgattttcttagtgagttagtttatatgatcttgtaagatgtaacccaaacaaaggaatcaatctatctgtgagtaggctgttgattcaagagggaaaccctaaacatgaaggaaggtataagttactgcaggaagaaagaagtcacccgagtctcctgagatcaccacaagacccatctgggaagaaaagacaagaatgaagtacagaagaagcaaagacctaatcctctacatctaattttcgtattcccctttccatttgcagtaatgcattgctcatttctctacttatagaggaagaggatcatacatcagcttggctcaaggataacaaagtgaggaaagatatctgaaaaggtaaatttcctattcataatttcatcatcctgttctgtcatcagaatttcaatgcaacctggagatcttgtgatattcatcaaacttgttcaatcttgtgcttttccattgcttgcgctttctggttcttgtgccgctgctttataacctgtaatttcaggttagctttttctagtgtcctattcttccatgtataatgattaaggccaacatactattaacattaacaaactcacaggtcctaagatgcctcagagaacacatatgttagttctaatgtaaattgtagaacattatagctttcatgttagacgtagaacacaatagttgcacattaaactcctataaaacagagcttaaattatgtaagatcatggggggttggtaaattgttaaattgtttctacttacgcaactattttgtctagttaattattagttgtatgcaattctggttgaactgagccaatagtttcagatggctatctatttcccccattatccattccctctagttttgcctttctagcaattggctgcaattatttttgttcatctatcttctagagatggctgtcccacaagttgacaagaaaatgcttggtgaacttgaggctatgggattcccaactgctcgttcagttagagcactccatttttcaggtatgtatttcaaacaaagttactgtatacaggtttgcatcaatgttttatgttgatgatacaccaaatagaaactacgacatttggtcccttctatggttgcaaaagttatgtttgtgtatttgtgcccatccagctatgcttccatggtttgtgtgttttcgctatttactaatggcattggcagttgatagatatgccatttcataaaaatggaaattatgcaaagctctagaaacgtatttgttgtaaatattcagtaatattatatctttactacgtagttcagtgaattggagaggtaataatatgtcttgatcaggtaattccaatctcgaatctgctgtaaactggcttctggaacatgaaagtgacccagacattgatcagctaccattggtaggttatttcttaacaatgaatattcttcattggcagaagtcctttctcaagttttcacttcatggaatttgacagcaagctaagcctgtacatataaataaccacgaactatttggtctgagattgtagcttggaaccttttcaaatgttgttaatatgaggctgtgaagcaactggcatcataatacttgacactatatttatattttcgatcaggttgtatagtcaagggagcattactgtcacaatttcactacatttgaaacaatttgttttaattgctcccttgtatggtctaggttccaagagaaataagcattgaatgtggtgacacatcaaatgaagtaagaaatgacgttcaagaaacgaggtttgtttctgttccttaatgatttcatagatgatttgctatggaaatgtcatattgccatttcagtggaaaaactatcaaatccaaagtaacaatgttaaatatctacctcaattgaggaatcagcaatctacaggatattttgtatgaatgacagtgtcagtgtgtgatgtcatataatagcacttgaagtctttgccacctcaaaatcaaaacgtcattctttttcttcttcggaatttcagatgaccttctatcaagtgtcattctctttttcttttctctttcttttttggtgtgtgtgtgtgtttggggggggggggggggtccttcagcctgcccactttgtaagactataagactacacttctgtgtcattcactaggaaatggaattatcaaatgattagtgatcatgttatagttcttgtaaatatgcttgtatcagtatgatatactttctatgcgtaatgtaagttcaataggaacaggtcattcagttaaatgcttgggtgactcggttaaatgtaactacctcagtagtcagatatacttgggtgactcgatgcatgtattgatccacatttctttttcttgctatggtatgctgttgcagtgtaaaatgtatggcatacttgtcttgcagggatactgtgctggagcagaaacctgaagaacagactgaaactggaagacagaatgtacttagtttcttcttttttggtatacgtatcaaatacttcctttaaaattccataccattttttgaagtaaaatttcatatcatattgagttacatgcaccgacaaatttacccaaaagcttaagctatgaagaatggttggagtgtaatcatgcttttttaacattcaacgagttcatttaccaatatattatgatttagtacgttgctatcacttgttagcagctttatttcagcctcctatgggctggaattagttttccgttctttgtaacattttgtgtcacacccaaacttctctcttaggagacatcccagttggaacgagaaccaaatgcagatgaacaggaggaacaagatacaaagaggtgtgtaccttgctttacattattagtagtaagttgctcacattttgtttatcgatcacacattcaccctagtatctagtaacacacttgtacttctcaggatattagcactatacaagcaaaaacgagacgaggaaggaagagcaagagggcgaatacgaaatcaattacaagaggatcaggtattgcgttttttttaataattctaagaagtaaaatgtaatacatactacagcaggaagtacaaaatgtgctttatcgcactgtcttaagtatatcctgtggccattttcttgtccactgaatgttctttctatagagggagaggattcgagctgctaaagatcttatggaagcaaagcgaactctcgaggaaaatcaaagaaagcggtatgtttcatatgcatgtctcacatgcactatttccaactccaaattgcttcttgaagaagtgacatttttgtttactgtaggatgatggaaagtcggattgcagatcaagaggaggagaaaagagcaagagagagaatacgacagcgtatagcagatgataaggtctgttgcagcaagctgaaaattctgcttaatttatacaaaaaattctgtagtactttactgtatttttttagcatgctcataattcattcaataaaccctttatctttgacatttttattaccttggatttcagcaatgaaaaatcgtgactctatgtttatcagagtcagatgaaatattgcagcctttctttatattttttgtgcactgtgtggattttttttatgaagttgtgtggattttattaaaccaagtagttcccattggttacggtcaagcttacgtttgaatcatgaattgtgttcaagggcgcttgctgtcacaaaagtgacgtcattttcttattctttagaaactgcgtctcatttggctatttccttcaaagttttccagtgatatgcgtcccgatgcctaagtcatatgcttttgagcaggcagaaagaaggagacggcttggtttgccactggaaagtcctagggcttcagctgcagtcataacacccacaaaggtcgaaatgcctttctacatagtcacgtacattttacgagctaaacctccaagcacattcgtcacgtacattttaactgcaggtgaaacctgttgaacgtgtcgtcacatcagaacaactgagagaccgcctgcgaactctgaagaagaatcacaaggtaaaatgatcccttgcagatactatttctgatccatgttgctcttagtagatcatctggcacagaagcatggggatgctgaatacgatgctttgtgtatatactctgtgcccttctgcatcttggtttagatcaatattccagggatgctcagtattagtctttcttagcctgtcttttgatctagtgtaggattggtgtcgttgtgcttctcaattgcttgtcacactaaacaaatacaaagatacgactgatccctgtgttactcggacgccaggaaccattgaatgtgtttctctgccacattacctgtaggatgaccctgctgctgtcgcaagagcgtaccaaatattgctcaagattgttgccaacatagtgaagaacccagaagaggaaaagttcaggaggatccggctcagcaaccctgttttcaaggtaaaaccaagaggaccgggcatttcagaatgctgtgatctcatctcaccccataggccatatcttcaacttcaattcacacctcgtgctctctgcaacaacaacaggacagggtgggcagcctgcaaggtggcgtggagttcctggagctgtgcgggttccagaggctcagcggcatcggctacctggtgatgccgagggacaagatcgacatggcgctcctcaacgctgctggggtcgagatcgcgtcggccatggagaacccctacttcgggctgctctccaagtgaccggaacggaacggaacggacatcatggctgcttcgtctgctttcctactactagcccatggaccatggtatactaaactggaacggacttcactgtaacggatcggcccgtcacggcttgaccgggatctgtcgtccctgtttgccggtgacgttgtacagagtaacccctggcgaaaatagaaacgtgttaggtgggcatgctgcatgcatgcgtgaagtgaaatggacaataatatctcattcaggataaaacaaaatacagagtgctgcatttgggttttcgagtatactcgtgttcctcagcgtacaacgcgtacatgggcagacctgaggacagaggccttgtttagttctctgaaaattttgcaaaatttttcacattctccgtcacatcgaatttttagacacatgcatggagtattaaatataaacgaaaataaaaactaattgcacagtttagtcgaaattgacgagacgaatcttttaagcctagttag

SEQ ID NO: 4822 - DNA, 4158 bp, Sorghum bicolor
ttgataatatcttcccttcagttgatgtctatttaattgcctcataattgaacagatactaacaaaagcaaaagaaggaattgacaacgttcagaaaggtatgcagattatgccgtttgctgccttgcactttctttatgaactccagtttgggtgtattcacataagtctaatttcctgctgtttgtgctgacagtgtcatgggcggatttgattgccgtggctggtgctgaggctgttgcgctctgtggtgggcctgagattccagtaaggctaggaagattagattctaggtgagacatcacagtgagtttttattttactactttaacctaaatttttttaagaaatatatatattccagattgtgttttgtctttctaccagtagttttctgaagaacacaattcttttatgcagcactgctgatccaactggtaaacttcctgaagaaacattggatgcaacttccttaaaaacattattcaacaagaagggcttttcgtgagttgtcttttttatgaaattattatatatattttgtgaattccagttcttaattttggtctactcctattttgcggacctcacctcctctgacctggcaatatttgagcagattttatgtttaatccctgtggcttctagccattgctccataaagcaggctgtgttaattagacctatgtctaaagttatgtttggtacttaacagggcgcaggagatggttgttttatctggagcgcacacaattggaggtaaaggattcgggagtccaattgttttcgataacacctatttcaaggtgctccttgagaagccgcaaacatcttcgagtaagtgcatgtccttaccaattgtttcgattctgtttttctgtctcccttggattttcaagacgacttgtccatcatagcccattcgatgtttatgtgcttatcaaaacacaaaacttactgtgtgggcttatgagcttatcgtgtccctttgtgaagctggcatggcggcaatggttgggctgcgcacggactgggcactcaccgaagatgacgagtgcttaaggtagttttatgaaatgtgaactacatcggctttcctcaataacatctcttttcctcgagtacttatgttctgtaagaaaatgtacttagcacgttgctacacggaattagatgggccaacaaaatgctaaatgttgcataattgaaatctgcagatggatcagggtctatgcagaggaccaagctagatttttcgatgacttcagggatgcatacatcaagctcgtagacagtggagcctcgtggagaacagcttaattagaactatctatttgactatttctgtacaatgtataatgaatttcccctatgccctatgtatcagtgtctcgtttggaccatacgagttgcactgagattttatcaaaacacaaagcattttgtttgcagaaggttaattggaaaaaaaggctctattttagattcatccaacctgtattctccccagcaatgaatccacaatttcttgcacaaaactcgtgagaaaggagttaacaacaccaggtgaacccactgagagcggaaaatgaagattaccagtgagctgtaaactgttattgtcttagtctcaaaataaattaacttctagaatcaccataagtcaaaatattttaagtttaacaaaatttatagaaaatggtaataatataatatcttataaaaaaatatttcatgatgtatctagtgatacaaatttagggtcataaatactgatgtgctttttctacaatttgatcaaacttaaaatagtttaacttattacaacaatataaatttatttaatttggggtgaagggagtgctcaggaaaaaaaaaagttcgctcggacagcaggacatgccaggaggaaccacacatctttgtccatgtgtacaactgcgctcgaagtctcgaacacgataagctcctacagccagtggttggttaattggtttcatgcgcggctgaaggcaagctgtagcagccgagaagcaggcaggcgatggaatgaggctcaccgcagccaagcctgcagccatcaccctcgccgagcgccagccgatccccatccccacatgcagctgcagctgcacggtggccaagaagagccgtagcgaccggctggcatggagggtcgcagtggcaagcggcgacgccgacgccgaggctgacggtgccgaggcgagcgctggcgcgggccaggcaccgacggcgcgagcggggcggcgggcccggctgtcggcgaggcggcgggagcgcgtcccgctgcccgacggcgtctccggcgtcagtgtcggcgagttcctgcgccacccggacgccgtggagtccctcctcaacaccggcgcgctcgagagcttcgcgcccgcgggcaccgggcccggcacgttcacctgcgggcttcgccgcatcgggctcctcggattcgaggtcgccccggtgctcgacctgcgcgtcgccccgaccagcaccgactgcaccatcgagatgctgtcgtgcagggtacgtgcgcgtggctgccttctcatttcaatctgatctgatgcgcggtttggtcttgagatgcaaagctccaccttcactgattcgagttcttctgtttttcttctgacctgctgttttcagtttgagggttcagaagcacttgagcagcagaatgaactcttttcaggtaagtttaggcgcctgttcaacggttcttctcactcaggtgtatgtgtatctaatgcaacaatgccacccaatgtgttctgcaaaagcatgtgttcttccacaatcaatgcgatcaattagctaatctgcaaaatctatgatagttttctgaatctactgaattttggcagcatttatgagtaaccatataacgtggagcgaggatgccgaggagccctgcctagacatcgatgtcaccttggaggtcactctggaggtatgctttgcattcaccactcggctgcaaggtttcttatattcttttttcttccaagttagtataagagaatatatgaagttaatcgtgcgttgattacaatatacaggtctacactaagccattcagcatgcttccactgtcagcagtggagaaaccgggcaacctgtatgtattcctgtacattcttcacacttcgataagttatttcagagataactctgaaagagaacaccagtgaccacctgaatcttgtttttaaaaaatagtagctctgaaagacccccatacagacacttaaccgactagttgagaacatatgaaattatgccgactcatattgtagtgtgatcagtttttcagaattggtaataatgacacttcgatttggcatttgcactgaattctgctgcagtttgatgcaaggcctgctggacaggcttgttcccatgctgggagagcagttgctgagggactaccattcctgggttcagcttcagcagcagcaacatgaagcgtcttgatgagattgaggcagacgaccggccatccttcagagatctggggatccatgttagggatggttcattgcaaaattggttgctcatgtatacagtacaactgtcgaatgatttagcaaattcagatataaaagaattcgtgaatcaaaatgcttgattttggtgcaccaactggccatcagtaaataaaaattctgctgtttttgcttcaccaatgtatcctatacttcatccagtaaataaaaattctgctagcgttacttcatccgtaagtgaaaaagtacagaggcacagtaataataacaaactgagtcagcagcacaaaaacaataaagcacaataaaaatatttccgttgccgggactcgaacccgggtctctcgggtgagagccgagtatcctaaccagctagactacaacggagatgttggaaggtacaaaacagaaaatctgtagtctcatatacagaatattctagaaagcatgtaccaccaagtaataacggcaaaactaacataaataattctccgatctaaatctgaatttctagacacatagtttttctaatattcttgtgcagttgtacgtgcagggtaggatatgaatttcaacaagaaggtgctgccaacgccagagagtctgatccacaagatgatcatgctgatta

SEQ ID NO: 4823 - DNA, 6041 bp, Sorghum bicolor
gttggttaggaagagttgaagccgatgaagcaacaaacaataattttacagacttcaaatttatttgagaacaatgataaaaaatagctcattgctataatgtatctatatcatagagggaagtagaagcctatgggatttcaccaaacgaggctttacttccgtcataacctatttttgacgtaatatcatagcaatttcttaataagagtatttttagtttgtgatacccaaatcttagcacgaagtatatgcaaacttacaagctttcaagaggactcatgtcagttttcacgagaaaacttataaagcgtaagttgcttggtttgtagcagtgcatcaaacaatcttttccaaaaagctaatgggatgccttattaggagaaaaggtatgaactcctcctattgctaggccttagtactcaaaacttaacacactaattacaaaacttaatgtgctagtttttatggtaaaaaggtgttagaaacataaaccaccaagttctacacatcataatcaatatctataaagtgttcttaaggcaaagaagctcatgtttctttcgatgatcgtcttgcatttcaaattttttagggtgtgtttggttcaaggagaaccatagcatgccacaatgtcgactactctaaaagcgcgtcaagcatataacaagtgccatacttttcataagaaatggcatcacctcaagatagtatacattgtcgcacatttggctacccgaagctatggctaaaccaaactctgaccaactccactgtaaccgtggcatggctagctctctcatggactaaatagggccttagctttttacttggtaatgatcaaccaaatagatgttgcttaggtcaatcaactacaacctcttgtgcaaaccaaacaaagaaaacaacatataaatcttttagataggttttgtttgctttctactaagacaattttgccaaacatgtgaagcaacctaggcattcgattttagacacttagggcactcacaatgcaagactctatcacagagtccaagacaattaattacatattatttatggtattttgctgatgtggcagcatatttattgaagaaagaggttaaaaaaataagactccaagtcttatttagactccaagtccacattgttcgaggtaataaataactttagactctatgataaagtctgcattgtgagtgcccttaggaagcatatgagctagcactagctctaagctaataaatataaaggaaaaagataatgcaataagtagtcttgaatatcgcgctatgagagagatgtatcgtgaaatgtgtaggatctatctctcaagtctaaattaatctcttattttcatattatttcgtgattacaaaattgattcagctagctctaagtttgattaatagaggtggcctttggaccatattgttgcctcggcgatagggagacttaggtcttgttagttggcaaaaattttggattttaggtactgtagcactttcgtttgtttgtgataaatattgtccaattatagactaattagagtcaaaagattcatctcacgatttacaggcaaactgtataattagtttgtttcgtctaaatttaatactccatacatgtgacgcaagattcgatgtgacgggaatcttaaaattttttagaaactaaacaagaccttactagagccaaacaggcccataaaggccaataggcagagggggatctcaaagtaaataacacaagtgctggggtcaaatgaggtagaccgccgcatccgtgatccatctactcctcttcccttcttatctgctacagcaataaatctcccgaggcaattttggcgtgctttacttacctgcttcctatttttccttttccgcgacaaaatcctttttgttaattgcgaaaacgaaagagcccgtgtgaactgtatgggtgaggaaaagaggaaaaaagagagataaattggaggccattagcaagaaaccatgagttctaggttagctgaaatctcccttatcttaatctgttcatctccttgcgtgagtctgtggtgctagtgtgatgccttctcctagctcatgagcttccggtctggaacttgcttatacttttgaactcatactttttttcttcattctccaactgctgggtcagaaattctggtgatttgttgggtaccccccctgcaaaatccgggcaaaagtggggatctacagcttctgtgctttgttggctttaaacctaccttttttcttggaccttttaccatttcctttgccatttttttttaatctcccatttccgccagtaatttacttttcttttcatttctacttatttccgtcttccatttcttcgagaaatttgcctgtgccgtaaaactttgtgtttgtcgcgtgaaagatctcgtacttgagcggtgaggggttttatgggttttttgcaggttcgcaatccctagtcctgacctcacttgagcgctcgtgagctctctccagtggctaaagattgcagatttgagttctagtccaagaaaagggtggtggtccgccatggaggtgaggtccgagcaagggctgatggcagggagggatctattcggcatgccgaagagcccgccggcgccggtgcctgggccgccggcgtccgcggccatgcagagcgtgcgcatggcgtacactgcggacggcaccgctgtgtacgctccggtgagctcctcggccgcgacgccgtcttaccagccgcagggcccagcccacggcactagcatgtctgcggcgacggtcgttggtggcaatggcgcgtcagctgtgcctggcatgggggagccggtggccaagaagaagcgcgggcgaccaagaaagtacgggcccgacgggtccatggcgctggcattggtgcctgcgtcggcggctacgggatcaccggctacagggtcaccagcgacagggcagggttcttccgggccgttctcaccggctgggttaaatccggcgagctctctgctagtggtgtcgccagatggatttaagaagcggggccggcctaagggttctaccaacaagccgcgcgtggatgctgctggtaaaatttctactcctatcatttacactgattttaaggttttggtatggtttctagactcagaattagtaggaactggagaagtacttgtggatagtttcagcatgatatatcaggataaagttattattgagattgaactggctcaagtgccgccgtccttttagaatttgaatctgtttcatggtgagctgaaggatgtactggttagactacccttctagctttaattagttaactgtgcaaaactataaattgtagatggacttatttgtcctcagttatttcagtgtacaatttatcacatgttcgttttgagagtgctgacatgtgggttatttctctgctgaattacgaaacatgctgctaattgttccaagtcctgcaaagctgatgtacattgactcatttttctgttgatgatttttagcataactagccctaacatgaaatcatcttgcagggtcatcaggagctggatttacacctcatgttattacagttcaagctggggaggtataacacgctatcttgcatttgaacatgttggttgttgttttattgtcagaatatgttcttgcttttattcttcctggattctttgcacgtgtttacattcttttggactttctctttttgctctacttttctatatataatgttcccactatgcaacctcttttacaaaaacaaaaaaggtatggtttgtcattccgtcaataagttgaattgccaaattgttcattcagacatttaatttgaagcattatgcaattccaactgagcataacacattatgcttagatgtcttccatcatgtggtgctgatgggagcataaagtaaattcttgacattttgtactgtggtaactgattattcttctcttgattgtttggcacatttcaagttttgccctcccagttttggcttgtgcatatgattgccacttcatagcattactgtttaaccttcatgtttgtatctttcattatatgatgtttgatgtcaaataatttcagttgctgtagctttgctaattagtggtacttgcatagcatttctttttatttcagtgttaaggtgttgagttctggatctgtgactgttaatgaaagcaatttttagggttcagtcttatttattagtagtgttttctgaaatataacaaaacacactcttttcaggatgtgtcatcaaagattatgtcattttctcagcatggaacgcgtgcaatttgtgttctttcagcaaatggtgccatatcaaatgtgacgcttcgtcagactgctacatcaggtggaactgtaacatacgaggtttgtgcctatggccagtggaagctaataaacacacttatctgtgaaatagaaagtctcaagcttttaattgtaaaggttctagatattatgatttaatcatgagaggtggaaacttctggtctagttgcagacgcaatcactgtacaatgtagatatctgtattacaaatgattataatttcattttttccctgtagggtcgatttgagatactatcactgtcaggctcattcctcctggtggagaatggtggtcagcgtagtcgaactggaggactcagtgtgtccctggctggtcctgatggtcgtctgttgggtggtggagttgcgggacttctcatagcagcttcaccagttcaggtattatgtttctccactgcaatttccctgcattccctcgttttctaaatgtagtgctccaaaatgggtttcatatcattaaagtttgaaatcactgtgtaatctctactgccttaatttattggtccgttgtacatgtgtactcaagaaaatgatgctgattatctgcatatattctctgcagatagtactgggaagcttcaattctggaggcaaaaaagagtcaaaaaagcatgctccttcagaacccacatcagtgccactgaaggtcgctccgaccaccgggatgggacccaacagccctccttcaagaggtacattgagcgagttatctggtggcactggaagcccaccaccactgcatcaaggcatggctgctagcaataataaccaaccgccgttcctgtctagcatgccttggaaatgagtttgcatcctcttgaccaattccaggcatataccattatgagcgaactgcctcccggtcaggaatgcaggatgtagcaatttgcggttcagtagcgctcgttctctgagtagctcttatgtagtataaatcagaagcttgggtaggaagagaattgcatctggtaaatttgtagctcctattgtaggtttcaccctgaattcctgtgctaggtgtattgagctgtaaccatgtgatcctttgagcgttatcaaatgttatttagttaaatgttctaccaaggcatgtggatttgaatcagaagtttcttatatgaatttgttgtttgcgcctgaccattttttgctctcgagaacgtgtggagccaaaggctttgtgcaaatatttttggttctcactgaaaatttgagccttttgccttgaatacatttggcttccttgatggtatgccgagcccttatggttctgttctgtgtcaaactatgcccacttcggtggctagccttgtttttttcattttaaaacaaaagaagtgatctgttttttacatagttcatgactagtgcgtcatcaaacacacaatgttggtaattgaacaagagaatcagatcatctagcaaaacaaaacatacatgaaacattcaacagggcaagtggcagatgctagaaaaacattatctaagcacaaattgaggataggtcacagccaatgtttgcgactgagttaagcgtagacttcagtaccaatgtatggtcgatgctcaaaaagtccacgatgtgctattatgatattccaacatgttcatgtttccaacgtaaaactgattgtacacctca

SEQ ID NO: 4824 - DNA, 5831 bp, Sorghum bicolor
aatgccggagaggaacgtcgtcacctggacgactgtcgtcgcggcgctggcaaacgcagacgggaggaaggaggaggcactcaggttcctggtggccatgtggagggacggggtggcgcccaacgcttacacgttctcgagtgtcctgggtgcgtgtggcacgccgggggtgcttgcggccttgcacgcgagcacggtcaaggtagggttggactcggatgtgttcgtgcggagctcattgatcgacgcgtacatgaagcttggggatttggacggtgggcggcgtgtgtttgacgagatggtgaccagagatttggtcgtttggaattcaataattgcgggtttcgcacagagtggagatggggttggggcgatagagctgttcatgaggatgaaggatgctgggttctcagctaaccagggtaccttgacgagcgtcctgcgggcgtgtaccgggatggtcatgcttgaagcggggaggcaggttcatgctcatgtgctcaagtatgagagggacttgatccttcacaatgcgcttctagacatgtactgcaagtgcgggagcttggaggatgcagaggccttgttccacaggatgccacagagggatgtaatctcatggagcaccatgatatctggtttggcgcagaacgggaaaagcgctgaggcattgagggtttttgatttgatgaaatctgaaggagtggcaccaaaccgcataacgatggttggagtactctttgcctgcagccatgctggtctagtggaagatggctggtactactttaggtccatgaagaagctctttggcattcaacctgagagagaacaccacaactgcatggttgatctccttggtcgagccgggaagctcgatgaggctgtggaattcatccgtgatatgaaccttgagccagatgcagtcatttggagaactctcctaggtgcttgcaggatgcataaaagtggcaatctcgcagcatatgcagccagagaaatacttaaactggagcctgacgaccaaggtgctcgtgtactgttgtcaaacacatatgcggatctgaggcaatggacagatgctgagaagtcatggaaagcgatgagggaccgaggtatgaagaaagaaccagggcgaagctggattgagctggaaaaacatgtccatgtgttcattgctggggacttatcacacccatgctctgacaccatagttcaggagctgaaccggttgatcggaaggatcagcgctcttggttatgttccacagacagaatttgtgctgcaggacctcgcaatcgagcagaaggaagatctgctgaaatatcacagtgagaagatggcaatcgcatttggaacaatgcatgcggtaggtgggaagcctatcagaatcatgaagaacctgaggatctgtggtgactgccacgcatttgcgaagcttgtctccaagagcgaaggcaggatgatcatcatcagggaccctgttcggttccaccatttccaggatggagcttgctcctgtggtgactactggtagccaggtactgtatgttgtattgttgttctgttccagattggcctcatgtgatgaggttgtggttattggtgacacaagacaaccacatctttgcaagcattctttgatccttattatggaagtagatacagaaatgtcctctctgttcactaatggccagaattatctagatgctgtttattgaaagaagagctagaaaagaatgttgtcttctagtcaaaaagaacaaaggaaaaagaagattaattagtaaaaaaaaaggtaagtaaagggagcaaacagaagtcatggcccatgaaaggcccattgggccacctcttctccctggtccacctcatctgcgctgcatcgcaacaggcgcaaacgacccgaaacaaacgacactaaggtttccggcggcatccacccacggccacgggaggtgcgtggaagctgccgcctgccggtgacacggcgccgatagcaagagtgcaagggaggagcggcgttgctggttgtagcggtgcccgtgaggcgaagcgagatgtctgtgcggataaaggcagtggtggacaagttcgtgatggagctcaaggaggcactggacgcggacatccaggaccgcatcatgaaggagcgggagatgcagagctacatcgcggagcgcgagcgcgaggtcgccgagcgggaggccgcgtggaaggccgagctctcccgccgagaggtaccctgactcccgccccccctaaccttcagttctccgttccatccattccgcatctcgtcttggccagcatcttttactgtcagctgttccatgatcacgaacacggaaccacttcgatttgttttttgtgatatatgaatcgtattgatgatctgatcgctgatgcattttcaattctcgctggaaatatgattgagatgacactgagcttgcatgtgcactgtccttcagtttcttgtgatgccaaacaagtacactgtaagagattattccttgcttttcactctagttgtcaccgaaggcagcaaggggaataaagctggtgtgtttcagttccgtagagagtatagaaaccagaaagaggtgataggtcgggtgaagataagaatataagagttgcctgcaaagcacatgtactgattcttttgagtagtgctaacccatactacacagattagaaaataaaatgttgcattagatatccattggcttatatttcaaaatttgaatatccattttgacttcttaagtagaagtcattgtttcctctaaaactgtgctgcacagtggcgaagccagaaatttcatagagcctgggcaagacaaaaaggcgtactaatagtaacatcaccccaacatagaaatcatatggtttgtaactagtaaaaagatgatgtgacactaaagagaaatatgacgacctcggactatctttgttttttagcatttgttagtgtataacaaagctatgtaattatataatacacaagcaaaattagacaaaaaaatagttttaagttttaaactaaaataatcactaaaatcctaggcagtgactgctccgtacctcatctttgcacttcctcatcaatgtatgtacttttctttttgagatttgtttagaaacatcttttcttttgagcagaatgtctgtacatagctttttgttttgttcgagaaaagtcaggtagctaatggtgtttgcagcagccaggagaggagcccggccactggcccagggtggccgggccttggctccgcccatgactgtgcaacatatatgttaagatggaaacttaagttggcgtctgctttgtattatctgacaatgtaattgttgtaccgagctatagtgggctagtcagttatagaaaggtgataggtgaggtgtcgccaaataaattcttctaaggaaaagcaatgaattgggagtacattaacactgttgatttatgttatataagacacaaattatcagcacaggtcaaggtaacgtaatagagatattctattaaagaaaaagatgcaccaaacatggtcctggttccaatatactttggaacaaggggaaatttgaactctagagttgaaatccggttctcatttctcaacacatgaacaatatgaatatgtaacttcttccgtaacttcttaggattcctttgaggtaagaagcaaatttgactggaagactcaacctttgagcgtagatggaagtcagtcttaatcatctgatggtcgatgatgcccatcaaaagtgattagtgaggccacagaggagtgatgagagcggtatctttcccaccaagggtctacatcaatggtggaaacagggttgtaggttgtcctaacagttgagctgctcatccattaatgtgaatgaaacaacacaaggcaggaaagtgtccctgtattgtgcaatagatgaaacaattcctacacgggtaacagtaggagtgggctggcactaggaagactttcttccattcttggatagaccaggtcggcagatggggtaagaaagtatatagagatgagtgtttgggccctgctaggtagggatacaccaatcttgttttgcgtagagagtccccatacccatattgattcgatgctctgtttccagcttataaggatgttgctgtgtagtgtgttctggttgcttggagacctcagcattgaaggacttaataggtctcaattttcatcacctcaggctatataattaaaaataccttttaggtttatgtccagcatcacaagagacctttctggtgtgaccacaatgaaactgctcatgcaatctgattgcaagctggatatgctgtcaaactctggtgagcaaactatattagtctataaattggataaacagcaatcaaatgagcaagatggatgtcataatcatcaacagatcagatttacgcctggaagataaacctaatctactacactcatgatgacactgagttaatcctatcatgcaaaagaagagataactacactcatgacgaaaagaccatgattgacagtgaggtgttcacttaggctatggagattgtcctagacttcaattaaattgcccacttctccgacacaacaacatccttacctgaattcatcttttaggtaaagtgaagactaagaaataaagacaattgatccaagtagtgggttgtgaagaaataaacattttgtgataccatttttcataggtgaactagaggatctgctgaactcgcacgtccaactcttttttcttttggtctttttccttgtacctcttcttcatcattgacacaacctttgagacccatgatttgacatggcacgcttttgtttttgttttcggcaggctgagatcgcgagacaagaggcgaggctgaaggtcgagagggagaacctggagaaagagaagagcgtcctcatgggcacggcttcgaatcaggataaccaggacggagccctggagatcaccgtcagcggcgagaagtacaggtgcctccggttctccaaggcgaagaagtgagaggtgacctaggatgacaggacgacactgatgaattaaccacgggtagtactacactgaaatcttcagtttgaaggctgcggttgtacgagttggtttgttagtttggtactcactgcatcgtgcatcctcattgatatgggcattgaaccagcgcacgacctgagcatatgattcagctgtcatggggtcactgctcgtagcatgaacttcagaattgatggcctctgttttgttcatctgataagaaggtaaaatcctgctgtctctcagtgttttacccctgaaacttgcttgttcgaaaggggagttggtctcttcttccagattggatgtgaaagcataacaagatatgagatcctctttgacacgatttcttcactgaactgataacacaatttaaaaccttgccacaaagaggacttaaaactctcgtcgtcttttggcacggtaggctgtaggtttccccgtttgggggactgggacgtttgcgatggcgacattgttatcttgaatgacgacgggggccccccagctcctatcctatcctgacaaggaccgttacctgaaaagccagaggtgttttgtcgaagcgtgtggatgtgctgcgcctcaaccgcctgcctgccctaccaatcccgttcgcctcaactccaccacagagtagtattcaacaacaggtagtacatttttttttttttaaaaaaaagaaatgcgatgcaatgcaatgcaatgcaaccggccaaatcatgcaagagcatcagacacgtcacactgttttg

SEQ ID NO: 4825 - DNA, 3028 bp, Sorghum bicolor
atatgtgccccaagattcgatgtgatgggaaatcttgtaaagttttggggtttttgggtgcatctaaacaaggcctaggacggacgtggctacaccacgggatagggccttgtttagttcacaccgaaaaccaaaaagttttcaagattctgtgtcacatcgaatattgcggcacatgcatgaagcattaaatatagacgaaaacaaaactaattacacagtttgcatgtaaatcattagacgaatctcttaaatctagttagtttatgatcggacaatatttgccataaacaaataaaattgctacgttaacaaaatctaaaaaaaaattctcatccaaacaaggcataggcgtgactgaatattctcggtccttgtcccgttccagcgtcggcgcacccggtccgaccgggaccggggggcacatcacatggaccgcgtgggcgcgtgggcgcgcggcccgtccggctggacacgcacgggcacgggcgcggctccccacgagacaacaacgacccaccaacggcccggcggccgcccctcctcggtattctgcgtcaggcgccgacaggccctgccgccccgcatgaagacatcatgccattgccaatttgccatgccatgcgtcgatgcgatgcgatgcgatgcgagagcgagactggagctcgtgagcttgttcgccttgcttcttcagaagctaacgacgaacggcgttgtttttctattcagaaactctgctttgtttagctcgcaaaaatttttaagattcatcgttacatcgaatctttaatcacatgtataaagtattaaatatagacgaaaataaaacctaattacacagtgtatctgtaatttgtgagatgaatcttttaaatctagttaatttatgattggacaatgtttatcaaataaaaacgaaagtgctacattagccaaaaactaaaatttttactaaacaaggctgtcggaagtttggcgtagtttatagccttgccctcggctcttttctttaaatattctccccgttacgcacgctgcaacacaaactttacgcatgtagatgtagtagtaggaattccttgttgttttggagtggagaccacgtaatgacgctgaatccaccagtctggtttttgctgtaatttataaatctggctgcgtatgaataatataatagcacttacttatacataataaatatcagtattattttttaaaggatctgtccatacaacaccgttttactagcccgagcactagattttttttttcactacattttctttctcctcaaaacgtgctgcgctgccgtccatcgcccagcaccgctatggcgcagtagggtcttgaggagcttcagtgagaccctatcgcatctgcagcaacctctatattcctctcccctcatcacggccatggtaacctctgccctggcttagttcaaccgcctccgccgccgttttcgcctccccgccatctctcccgaccctaccatctagcctgcctccccaaaaaattttctaagcccatcgaagatggggaagaagagagagagaagacgacaagaaggaaaaaaattgagtgttctaacatttgagcgttgtacaatatttctcttttttatgaactttgcttaaacttcagaccatttgacactattctagaatttcataattttttttgggaccaaagacggtccattttcccatgttttctaaagactaagttcatttttcttactaggaaaatatctacacacgtggagtagcatcagtttactatagtactaagcacgcatggtttggtggagtaactaatatccagtagtaggcacgataggaacgcagctgctccagctgcattcagcagagctggctgaggagccaggtgttcacccctttcgccacttcgcttcgcctaccaaccagagagccaacctccgcgtccaagatctctccccctgcccccctgatccacgccgcggtggtcgtcgaggcgcaatggcgaccgacgcgatcctggagacgatcaagccgcggcggagcgaggacgagcagctcccggtgaccacgcccggcgccgcgggaaccaaggcgggcggcggcggcgggatcggtctgcgccgacgcatgtcgtcgttctcggtgcacgtgaggccgccgccgtcgctgtcgctgtcgtcgtcggtggcggcgttccgtcgcgcgcggtcgatgccgtccgtgaaggcgctggcggcggcgggcgcgctgcggcggtggtgggagtgggggctcggctgggtgactgcgccgttcgcgccccgcgggctggaccacctcgacgacgaggcgcggccgctgggcggcgggtgcagctgcgccggcggggccgcgggcggtgggtggcggcacgtcctgttcaagctccgcgccggggcccgacgcctgctgggccgcgatgggcggccgctcaaggccgccgcgccgcaggacttcgggtacgactccgttagctacaagcagaacttcgacgacggcgaggcgtgagcgtgatcttgtcgagccatcgaggaggtgggaggtgggagagccatggggagcgggcggatccgcctcccacggcattgttgcttatttgcttgccgtgatcgatcgatcgagctgccgcaataaagcaattgatgattttgtggtggtgtatatggcatcctatatatatacatatagcatggtaatttgtgtgtgtatgatggcatttgacatcgatcgatcttggaagaaagatgatcgatcgatcgatcgttgccgcaagttggagaccacgaacatgtaactagtgttgtttccttgtttttggccgtcgttgccgtttagcactttagcttcagtcttgctccatgaatgaagaacacgccatggattcggtcggatcctggacagggcaagcagatgtaataattcaattcaaagcggtgtcctccaaagcaatggaatcgcagcaagcatttgtgatttctgaagcaccgacgcgatcgagaagatcagat

SEQ ID NO: 4826 - DNA, 4693 bp, Sorghum bicolor
aacctcacgtccacagcaccaccgtcctcccccaaaccccgatgctttgcagcagcagcagcagcagcacctgccattccttcttctggtagtccaaaataaatgcgcaaccagacaaacgcaccaagacacatcgtacacgaacgtgtgcatgtgagtggaatgggcatgggccgggtgtggtttcagaaaaaaaatcatggtgcaaacaaaaaggtggtgcatgcaacttgccaatggcagcagtgcttttataggccgcatattgtactctaacatgccatgttaatcagttaaggccttgtttagatgcaaccaaaaactcaaaactttacaagattccttatcacatcgaatcttgcgccacttttatgaaacattaaatataaatataaaatataactaattacacagtttacctgtaaatcacgatacaaatcttttaagcttagttactccatgattgaacaatgtttgttaaataaaaacgaaaaagctacagtgtcaaaaactaaaaagtttttgaatctaaacaaggtaatagaacacttaggaataagagacgctctatgcagtgacggagccaacggtggggctggtggggctccagcccccctacggccgtagaatccacgtagccccccttagcttctaatacaaatttttatcattgatgctctctaagaatgagctgaagataacagaagtctctcctaaatatttttctagatttgtctctgctctacatactaaacagggcatacaggagtacacatatgcatacccaatcgagcccgaaggattagtgtgtcgacatggcaagctgtgtatgtagacacttacatatatagtaccctgaaggaagtacacggtagtacacggaaacagtttgcgtacatgcatgttcatcgccctactgtctgcatccctcaatatccggaacatatatacgtcgctgtctgcctatacgaatggatgcatgcacacgtgtacatgtacgtgcgcaggtacatgccggtacacgctccccgtacaaaagctccccgttcaagcacgacggatgcaaagcatactttgtacgtacacactgcacggcgatgaatgaacgtgcatgcacgtgtacgtagtcgtcgtccttgttttttttctcacggcggcttcaaaagttgtgttgcgtcaatgcatgcatgtatgttcatgtatgcacgcacaacgtacgtattacatgctgtgtgcacactgggcgtgtagttgagactttacagcagcagcagctagagctagctactcgtaggtagtatagcctggaactagccgtggtgtacgttgctacgacgtgcaacagtttcccgttaagctccatcaagtttcctcattgggcccatgccaggtgccaccatgtccgtcgccctgctttaacctttccattccacgtaggagtatctctctctgtgtcgtcgttgtttagttctcagtcacaaaatttataaaatttttcagattcatggcatcaaattttataggacatgtataaagcattaaatatagattaaaaataactaattatacaatttgtctgtagtttataagacgaatcttttaagcttacttaatccatgattggacaatatttgttaaattcaaataaaattactatggtgtccattttacttttttttttttgcaactttgtgatgtgtgtgtgtgagagagagcgcagtcatggtcctcaacctcatggtggtacctagcaagctccccactataaagagccccccttgcattggctccatcttcatccctcacaccacaccacaccacaccacagctcagagtcagagcttctcctcatcatcttgtagaaagagtgagagtgaggttggcaaagggtatataggggtcgttcttggccaaatctcttctcccgcttggatccttcttctctccctgcttcgttatcagcagatcgatcgtggctagctagctgcgtagcaccgtgtatgcagcaccaggtccaggatcaccaccaggccatgggcgacacgctgtgggacctgctcggggaggagatggcggcggcgggcggcgagcacgggcttcccccagggttccggttccaccccaccgacgaggagctggtgaccttctacctggcggccaaggtgttcaacggcgcctgctgcggcatcgacatcgccgaggtggacctcaaccggtgcgagccgtgggagctccccgacgcggcgcgcatgggggagcgcgagtggtacttcttcagcctccgcgaccgcaagtaccccacgggcctccgcaccaaccgcgccaccggcgccggctactggaaggccaccggcaaggaccgcgaggtgctcaacgccgccaccggcgcgctcctcggcatgaagaagacgctcgtcttctacaagggccgcgcgccgcgcggggagaagaccaagtgggtcctccacgagtaccgcctcgacggcgacttcgccgccgctcgccgcccatgcaaggtatgtgtaccagtactataggtgatagctgcatctaggagtactccatgaaatgaaccgatttgttcagggcacattcctttctcgtgtttctgaaactaaaacgacgcaatagaatactatgcaatagaatactatgcatgaatgccgtgaaacgcaacagcgtgagatgtgatatcattgacaagaagtaggagttgcaatgaatggcatgcatgataatgcatcatagcaggtacaaggagagggcttgggggcgcgatatatgcatgcatgcagattgatagatgtgtgctttatgtagggagtactccttctgtgcattcatcaatggcactctactagctggtgtaacgcatgataatgcactggtacaacaaccacagtgcttgtgcacatcttcagcggttcagccgcagcagcatgcatgcatggccaggagtagttccatctatcttctgctcgaaatctatttgcactgacacacaggatccatgccctgccagcaaccgatgcttctgtgtgtttgttttttgtggttgtgttgtgcctatctccaaacactgacatacctcccgtccaaatctctgccgtacaatacgcgagcatccaatgtgcttgtgggttttcttttattaaggccttgtttagttccgaaaaattttgggaaatggacactgtagcactttcgtttgtatttgacaaatattgtccaatcatgaactaactagactcaaaagattcgtctcgtcaatttcgaccaaactgtgcaattagtttttattttcgtctatatttaatactccatgcatgcgtctaaagattcgatgtgacggggaatgtgaaaaattttgcaaaattttctgggaagtaaacaaggcctaaaatttgtaaaacaagtgtgccatctgcagaagttgttcattcaggaggacattcatatacactaaaatttcagaaaaatatatatactatatgcactgatgtactacctctatgtgctgcatgcctagagagatcaccttctcagatactattaaatattgatgactcttctgcccaggatatggatcacaatcgacagaaaagaatccataaatatagtatgtctatactcctgactgatgatttgctgaatcttttcatacacattttttatacatgcaggaggaatgggtgatctgcaggatactgcacaaggcaggcgacctgtacagcaagctgatgatggtgaagaacccctactacctccccatggcaatggaaccctccagcttctgcttccagcaggagcccaccgcgcatcccctcacaaaccctagcggcggctgcacaatacccctcggcctccccttccaccacggccaccccggcatgcagccgccgtcgccgagcaaccatggcaacaagcaggtcgtcttcgccggggcagcgggctgctgcatgcagcaagagccgccaaacggcagcaacagcgccgtgctgcccatgccgccgttccctcccttcactcccatcgtcgctggcaagccggcggccccggcgccaccgccccaggtcggggtcaacgccggtccacaggagccaccgccaccaacctggctggaggcctacctgcagcacagtgatgggatcctttatgagatgggcccagctgcagcgcccaggggcgcatgatccggaccgttggttccttagggttaccctactgaacactgatgatccatcgatttacctggcctggagtactgcccagctagctagtttctaagtgtcatatttcgacaagcacttgtagttattagacagactatcttatattcgctacgtagcatcattagtcgttgttattatgaaatcatgtgtgcttgcatgcatgcatttggatcatcatggcagtcctttgcttgtactactaggcactgtagtgttgatccatccacatgcaaagtgtgcatggtactagctaagatgtatcgagatgtctgtttgtttagcatgcaatgatagatccgggctccagtttcatctcgttaatcatatttcttttcaagatcgaggtaacagagcttcgccgtaatttttattagaagacagataaaaacgaacagcaacaataacaacaaaccacttacatcctgcccactcagcctaatcctacaatgagagaagggaga

SEQ ID NO: 4827 - DNA, 5278 bp, Sorghum bicolor
gtccaaggaagtggatgttcagtcgaaacccaggaaaatttggacaccacctttggtgaataccgttaacatcaactgcgatggagccttctcttcaagcacgtgatcaggtggatgggggtttgctaagaagtaatttcatttcgtatagtgtagctcatagccggcattcttgtaatatggctgctgatggccttgctcccctttgggcgagtttgagtctgggtactgatccgaccttcaaggcgctatggcaccctaaacaatcattttacaaatacccctacatatatagatagcatgacataagctattacaacaatttatgattgctccacaaattctcaatttttgtaccattcagctttagtgtattttcaactatgacagaactttatatatgcatgtgtaccatatatcttatgtacataacatccagaattatgactattcatatctggagggccatttggcgcggcaacgccgcgcaatgttctagtctatacctaagcatgcatgtaactatagatcatgctatatggcccactctcaaaaggcacattacatgtaatcccactccactcgtactatatgatatgggaggcaaataaagtgaggatgctaagctatattcccaatcgatcctgcactggctttttttttacgtgattcaccgtacccatcgccatccaacacaacaactttttgctagccttgctcgaaatcgcgccgctgctgccgccggcgaagatcgaatgaacgctcgatatggatggagtgtatcggcactttattggaggtgagtgtgttgccatttcggtcctacacaaacacaagacagatagagagtatagctagacagagacaggcgagaagaatctgtctctgtacgtaccctgcaactgcaagagggtatagtatagatgcaggacaggtgcttatattattccagcaaaagggccaacgccatggctggctccggctcccctcggttccacagcgacttttgatgacgcctttcctcacattctcattctgatggctccggcgacgctgctctgtgggcggcggcggctgctcgacgtgaatcctggccggaacggagtggtgttgtgttgctctctcctgaggccctatttcctctgaccaggaacggtcacctcaaacaattcccagctgagcatgttcgctgctccgtaagttataactgaaattactgttgactaatttattgtgacagaaaaactctgttggttggcagaaaaatacggctttgattagtgaaaataattcctgggctcaatccaccttaggcatcgttcgtttaggccgaattggtatgttttcgggcccattcctggcggattgtggtggcctggtttcaatctagatattcataaaaatatgtattcgtttcggcccgacgtgaaatcaaaactaggctggaacaaaaactaacttcacttttcactgtgtctgtggcccgaaatagaaccggacctcctacaatctgaattggctttttgactggaatgagtgacaaatatggatccactcattgctgggctgaaaaaaaatcagcctcggaattcaattctgagcaaacgaatgagggcggctgcgttcggccatgattttggcctgagaacttttctagcttatctaaactatgtaaattaatgaagcaaattcatctgaaatcattctagagacctaaaccggatcaaccgaacgagcctgaacaagcccttttccttccttcgtggttgggcctaaattttgtcctagcatccaatctgggcccccagaagaagggtcttggttcgcgggccgtaatcccagacggcccactccagacctcatatagcgacgatcccggagcccatcacagcagcacagaacagttcggaccgaaagcccacgaggcccactcgaccacccacggcccgtttcgcttccgccttatccctcggaccccgctgtcggattagaacaacagaatggaggccggcctgcgcgcgcttggccaccgctactgcggcggcggcggctgcggaatcagcctcggtgggttcgccgccgcgcgtgccatccggctccggcgccaacgccagcgtcgcgcggccgccttctgctcccgtgagtggcgaggagattgtcttcccctccagttgcagtgtgtctgtgtctctgacatctcccgcgcttgcaaacgtttgtgcagttgctactgttggtggagatgggaatggcgccgcgggtggtggccccgtgaggagcggcgtcgaggtggcgcgcgccaggaggatgctccatgtcgtgctcgtctcgccgctggtaagtggtaactgctgtcttcttattttgaaggtttcagctctcattcctgtggccgactgctattcgattgagataaaaaaaaaggtccgtctgccattttaagctcgaattctacagtcactggttgaacaagagttcggattggtgcattgcgccttgtgatcttgtctgttcacgtgatgcctaaatctgatacattcaattcaataattgggaagagaatagctctaacccttatacgatgtgttcggattagagacagaggatgtctagtctaatctgtttttacagatacagaatggccctctactttagctgagtcgtacaccacatgacacatgaacaatatcatctacatgtttaaatggatggaagggcaatgcttctagtacaccatatcctaaccctgctgctgttttgctcggtggacaataagagggtaaacttgtaactctttgctgtggtactagtgtagttgcttatttatggatggctctactttgattatggcatgccatactagtgttgcaaactagtaactagttgcaatgtaacactattgagttgatcatttgacttgctttgttgttgtcgctgaattatggatgactgtactttacagataccaggaaatacagggtccattgcaaggacatgtgctgcatctgcagttggcctgcatcttgtcggggtaaggttagtctctagattatttgttgtgttatttagtagaaggttcttgatgttgcatcacctttcttaccccatattgtcaaccttctacagtcttatgttgttactgaaatgtgcttgatgttttttcccccctccagccattaggttataaggtagacgacacaaaattgaagcgtgcgggattggattattggccgtatcctttggttggatgttatattttatcagttatatattggctcccactcaaaatttaagtcaattaggtcatcgacatggtctaaaacataacagtttgatgatgaatagatataaaaatatgttatttgaggccttgtttagttccgaaaagtttttggatttagctatcgtagcattttcgttttatttggcaattactgtccaatcatggactaattaggcttaaaagatttgtctcgcgatttacaggcaaactgtgcaattagtttttgttttcgtctacattctgaaatataaagagttaagtattatagaagtatttttcatgataaatgtagtaacatcaacattctgttttcagtctacatgataatctatgtatgatctctaacataataaatcttgccggcagtgagcatacaagcaacttgtctactcaaatgtcagtgttcttccttaatcatcactgcttttaagatacgttgttgtcaagattcatgactcttgggaccacttcttcgattatttcatgaagcaggtgatgaactctctgttctcctgtatatttaactaccgattacttttcagcatcatcatgttgttttgaccccattaggagggagataaaaggctgttggcattcaccaaaagaggcacacaaatccattcagtaagtaaccgctgcttgttcaagtaggattgtagtatatccatacctgcactgcaatgaaaactgttgcagtgcgtataagatctcaactaatttgcaaatctgattaatttattatggaaatggtccgtgttgatggagatttacagtggaacacattgacttgattgtgctctttctatagacctatactcaatttgcaactccgattgtttgacattcgcttgattaatgtatttcatgttctgatcaggatttctcctacaggccaggggactggctagtctttggttctgaaacaaaaggattgcctcaacaagcccttgaggattgctgtagagaaggcctaggtggtggaaccctccgaattcccatggtggaaacctacgtccggtgcctgaacctctccgtcagcgttggaatcgcactgtatgaggcagctagacagctgaactacgaacagcttcagtatcagcctgagcttccggaggaagcacaggggctattcccagcagaggacatttatgcatgaaaacttctgcctgagaacaattcatatgtagaaagactacagccaccgaattgatcacctcaccttttttttttgtactgttggccgtgacacatgagcatatgattgagctggaggaccacacacgattctgttgcgaattcaattccaagctgtcgaggtggtgttcacatgctcattcaaaatgtgtaccagatttgcatgaaagaatcgttttagtactatagttttgcagtcagaaggtgattagagtatgctaagatggggtctctttctgacttttttgtgtactagtactggttactgaaccataagctttgttaattgcaattagatgcttgcctctgtgtcaatgtggtgagggaaaggttggtgtcgaaactttactgccattcaaaacattgtctctggtcacgcacgcagctcacaggtcaaatagtgccctatctgtagctgtcccgaccagtgaaattattgggccatcagctgcgctggaggtttataaatgatagctcatcagcagcaactcctcgttgtcctatgtgaacactgaacagcatggcacattggtgtttctgaaacactcacattggtgtttctgaaacactcgaatgtgttcgggattgaacccgtgaacggcatgcatcagaaaacagcatttttattctcgagttggactggcactgttcggctgtacagttcatgacacaactaaatatatcagcctatttataacgcagcaggattattaaaatgtactggaggggggcaaccccgcgaacaaataaaactaggataatatcccgtgcgttgctacgagaatttcagatagtttaaaa

SEQ ID NO: 4828 - DNA, 11088 bp, Sorghum bicolor
ttttaggattttgagttgcattaattttccatgtaaaaacatttggaattttttttttttggaaaaaatatttttatgatttttggattttaaaatatttctagtttgatatatacctccctaaactttcaacttagtctgatttaccctcttttgacgtggcaccacatcaacaaaaccaatatcaaaaccacacagggtgtaaaaacaaatgattttaaaagtcgagagttttgtggtttaatgaggaaaatcagacagacgtgatagttgacggagataaatttgacttttttcttcttcttaaagaaacgttgaagtgctaacataatgatatagctcccctcaatgttcaaaaaggtgacactaggcagtcacttgggcgcactgacgcgctagggtaccgcctcgcctggtggactagacaagtacctaggcggttgcccgattgttgctggcgcgccaaggcagggatgtgtgggggcgacgcggaggtcaagagatgataggggaggagctaaggtgaggtagcggcggttggtggagggaagaggtgtggtggtggcggtggcacaaatgagcatagaagggagcacgagcagatgttggtaaggagagagacgaaacagaggcagggggataagacttgggcccaaacatgagaaaacttgggtcgttattaggccttctcttctttatccaccaacgatctgctatttttctctttcttttaagtatttatgcatcgcataggaaaacaccttaaaacgtctagacccgctgaggctctagactatgggtgaccgcctagagagcggcaagcgtcatgttgaactttggctccctctaattgcatctcatgtcatattgcgtctatttttctaccaagctccatcacaaatcagtaggtaacttaaggtcggtgagtcaaaagtcagcaatactctttggttccatgtcaagtaacccctcggtccctaaaaaatataagatggtttgactttttctagatacattgcttttactaactatctaaacatagtatgtatctaactatatagcaaaattttatgtatttagaaaagctaaaacatatttatatttataatttaaaatgaggactataaaagaattccaaaactcgatcactatgttatacattgcatgcatgtgcgccacattgtcacaacttctacttgtttcgtcttagaagatgccggtgcaacaatcgagagcccgagatgcatgtgagtttgatgcaaggcaaattttgatcataatgtgaagcggatagatggaatcaatcgcaacgccttcgagccctcaaagtctctcagatgcgaggggtagagataaatgaaagatgagcatttgaagagttcaattattgtactatttttagtgctaatttgatacaaccgattcccatataacttatagaggttttctctatggacgagaccgaatacacaaaaaactaagcatccatgctaagtctagaattttcatttaaaaatcaaccaatttccaccataataaagctaacaaaccgacccctaagtgacttcaaataagttttttcttaagagatctactgatatagtcttttgaagatacttagataagatttagtgttgttacaagtgagtgtccatagtggtacgagcagtggtgtagctagaggctctgtgattcaaaacttttgtatatatttctgtttcaactactagtataaatagtttttttctaaaaaaataagttctttaaagtattatttttattgttttcctttatctcgattatctctaatttgtttctctggctccacctcttgctacgagtgctgcaggttaagaacctgggtcaaatgttagaaaaatgtcagataagcagatgagcgacgcccatcaaatcgtgctcaatttcgtggccaaaccacccgtcctagctggcacccgtaaaggagcccacgcaaagcaaaggcaacagaaacccacgacaagcccaaacaaaaacccaataaaatctcgcctggcctctcgcagtccagccagccccgtcgcccaccccaatctccacgcgtcgccgccgctcgccggcgcgtctattcccctccgccacgctgccgaagcttcccggtccctgcagcggttcggataaggcggccgcccgcccgccacccgccctcctttcgccccccactcctctcggtcccgggaccgcttcgggctggatctagggttgcgtggggagctctggaagcctccgccgcgatggacgaggcggacgatgaacttcgcaccttgaaggtcggcttcaccgccgccggagaggagcagttccggaagctcgtggcggagaagctgcgggggttcaagagggacgtggaccacaccctcgtggtacgatttccttctgtcatcccctactcgctagcttctggtcttagtggttgatttcggctgtttggggacttgggttctctgcagctttaggattttggggctacaattcaagatggcctgtgcaagttacgcgaatgtgcccgtgtttttgttcagcgtcgccccgcatagaatgcgtttttgtttagtcgccccgcatacaacacctattgctggaatcagtcagtagtctaatgtcgttggatctcatgggcctgcagctgtgctatgtgatggctgcagttttcgtttgtttaggctgactgctgtatgttttttttccaacttagcgtgctcactatgtacacttagctgctcttaggtgagattaactagtttaatggattggtgcactatatgcaccaaactgttgtgtgcgatgtatacttcatacttatgaagcctcttctcaaactgagaattttcaatttttcaaatcaggatgaatatgaagtgtttgtctaattgaagcatgcctcagtttgtactggttcagtaactgtcatgttacttgatgaccatttttataaactgttgctgcttcactagtcaatatttttagttgggcatgcaaacttgtttgtgagttacttctgtctcaggtgaaaatgtacattacaaatcacaatcatcgaataggctatgcagttcacaggtgttgcatgttatcagtggtgtttttggtgcaactgaaatgtaatacttatttcaagcatggtataccattggttgaatgagtttactatccttgtatgttaacatttgctattgctatgagtctttacaaccttttccactcatcacaattgcactattcatctacttagtcaagagcgcccaaacttccctagaaaacagtgctgtatgcagtttcactggtggaacaaagggaacctacgaaagacactgacattatgctttcccctatctttagtgaatggtgaaacaatccaggtctggtctttgtcttttctgaggaagcatcacaatacatgaattacattggttatgtgtatacttcctctgattgaaaatagatgtcatattattcttcctggagcttgtagttctagatatctttgctctttatagactcattattctcataaataaatgaccccattttccagtgtagtataaataaagtgcaacaaggtcgttctactaactttcttattccttgtgcacaactccgaaatggcattatattttgatttactgggagtaatacttttgatttccgtgtaccaactttgcaatcatcatcattatcttagcctagttttcattttattatgttgagatatttcaaggaaaacaataagtggacctctgttgctgtcttaagtgcaggaatatgttactatcatgctcaagaatggaaagcgtaaggatctcgccagtaaagaactccgtgtatttctaggggatgatactgcagtattcatttcctggttagtactgattgcactcacttccattgttcttctattctttatttgtcaactgcctgaaccagtccttgatatattttacatgcaaattttttttgtattgtaattggcaactcactaataagaatgctataaataatggtaaaaagttagcaaatggtctccccaattttggcgtagatatgacaaacaatattgtatgtgccctagtatttggttcactatttgatgttcagacaaatatgtttatattgaacaataataaaataaggctctaatgcacctttccagtatgtggaatggaactagcaactaactggggtggcagcaaaagctttggcaaagttgtgtttgctacagacttcacagtagatgctctatggtaacatgaatggttccttatatgtacgtagcttgaaagtttagttgaatctatgtacctttgtcatgtaaacacctgttatttagaattttagatcagtccttataagttataaacgtgattgttattgagatcattgataaatccactcacgagaagcacatcaatcatgagaacgaatcccccacccaacccacccaaccaaaagatatcttttttcacacacttctgaattcatgcagtgtatttattgaaatcacattgtggagactgccataagtttttaacagcaaatggaaatgagaacatcagagctacttttacttttgaaagttgaaactaacataaacactgagaaatgtgcactctcatctttccgtggcaagcagtacatggtaactaggaggattccccgcgtgttgccgtgggtatgaagaagaaatataaataggttagaatgtgtattgcctagttggacagcttgcatgttcagacaaatatgtgacttgctgacgtggacattacaattgcatgagctagtggattttgattatgtgtgatggtggattacctagttggatagcttgcatgttgaaagaaatatgtagtggggttttgctttataatattatataagatgcatattgcatgagctagtggattttaattatgtgtgatagtggattacctagttggatagcttgcatgttgaaagaaatatgtagtggggttttgctttataatattatataagataagatgcatatctccctagttgattcagcatcatatttcatatgcatcagcaaggatggatagaagagaaagatattcttggttggctttcatatcatctcatcatgtgttaaatgaatctgctactcatattgttttgcttttgtaggttgtgggaccatctttctctaaatatgtacttatatgtgcaagcacaagaacaaactcaggaggttaaggatgatgaagcccccaaagaagtatctggaagagaaaaatcatcagatgtgctcccgagaagcaaatgtcaaactcatagtgagcacacagttgaatcaagtgcagctagtactaggaaacggaataagcgggaatggaaaggaattggtcgggagggtaatgaaaaatttccacttcgaaatgtactaactgatattcttcacggggaggagaaaagatcgcaaaagtccaatgaaatacgacaccctccatcaaaacaacagaacggcagaaagcgtgacagggatgatgagccacagcaaacaaaggtgtgatgtgttaccaattacctaggtcacaactgcaaactacataacatcttatgttgttgacagagttgatggcaagttggcaacattgtgctttcatatatatatatattttactttaccaatatctctcttctgttctttcgtgtcctgcctttgctcacatattgtttgcagactatgcctaagtgttcatctatatttctccagaacggacttaccaagactctggtagctctaaatcagtagcaatgtgcaaacatgtggtgggaactatagcattaccatacaattaagtccctaccagtatttagttatttattggcaactgacagaccaaatatttgttcatcatgaaagttcaacgtgagttttgccagtttaaattcagtaagtacactggagtttctttggttagaaacaaccgacaaagcttgtcgttcccgttagtttggaatttcggagaactctctgagtaggcagtccatttagtttatcttctagaattcctatgaatattttgtaccctctccattccaaattataagttgttttgatttttctatgtatatttttactactgtgtctagatttacatgctatgtctagatacataataaaagttatgtactcaaaaatgccagaacgacttacaatttggaatggagggagtaccaagttcggataaggaaattgcttgtttgaactgctgaccgctaagggatgagcatcacactgattctctctaagccctttattggtcccctaacatattttctcctctattatattctattgctccttcaaaatttaattatattcttttaggtactatatgacttctacaatcagcttgttttctttgttaacagagagacgtctcatcacgccccatgcttggtggtggtgcttcccgtcgtcttctacagtttgctgttcgagatgcagtaaaagctgtacagccaaccagcaccaatgctgaaccagcatccaagcgtctgcgctctgtggttgccactacttctgcagagaacatgcatgataggagatcagaaagatctcaggactacctgaacgatagaagatcagaaagatctcaagacaacttgagtgacagaagatcagaaagaactaggccaatgctacaggtacaaggagctgctttagctcttagagctgcagcggaagctgctgcagattctacaaaggttagatctactggaagtgttttcaagcgattgggtcaagggaatgttgtgaaacagccatctcgttctcgtgatgagaagagagatttcgaagattttgagccagctacgaccgcagatgaacatgattctgatcgatatgttaataatgaggaatctgaagaggaatctggagagctgaccatggcagatagggtagctggaatgaatgttgattcgagctctgaggatgatatggaccgagatgaggggattacaagataccaaacttctctttcacatgaagatactttctcaccatttgcagagaagaaaactgtatcagcacaatgcagcgtcgaaccagagaccgatgcaataaggccttcaagtgtgaatgacaaggagcaacctgttccttcatcaacaaaaacagcaagtaaagctgtggctatttctgttgatgtaaatatggtggaaccttccagttatgaaacaccaaaagatgttcatgttgtggagaagccttatgttacacccatgaattcaaatgccaccacactggctaccaatgccaaagtaagtgaccttgcatgctgaaaaaacaggttttatatttaaatttcttcccacatctcaagtcacccattttcttgcatttcagttaggtttgtattgtgtatatgcttaagatttctaccagatgtctttttgacttttggtgactatagatttttacagttcataatcagtcctaataaggcaagatcggagcttttccttggaacctttccttgctaattagtagttacacttatatgaatgaaatgggcagagcatttggggcatgaataatcatgtaaattcagaattgtttatcttatttgccagtactttcactaaactaaattgggctatgtgaatgcttgtttgcatttgcttccagcaaaagaaacattagatgtataaaaacaggctttggcatctcctattagtgttatatatgctctcagccattaaacgaaatggcacgccatgtcatcttccatgcatcttcttgattatgatgctcattagttttcttttctatttcctatgatcattttatcttgtcttgtgggtatatgccctgactatttatagatgtatgggctaatccttgggtaaatttgcttctgactgatgccaactttcattcaggaagtaggccatgcagaagctcaaaaggattctcagcggtctgcaccatctggtatgccacatatatctactaatataagatccacttatggtttttttcctttcaattggctgatctgctcataatggcacatgccaatcttccatctggttgactgtatgtggtaatacactagttatcccaacttgcatgggattaaaaacccttgttacttttcctgttgtaatatcacatatgttgccctttcttcatcatcttacctaagaaaaaaaatgtgcagttactagtacagcaaaatctgtaaggatttgttgcctttgtgatatattgagattattatgatgcgctgtgcaagtcattattacaatcaatcataaataggaatgggttaatcttgaagactgtcatttatcgcttggtataatatatcttgtcttctttgcagttccggtttcatatagcacagcgcatccgacggaggatgcagattcgagaacactttatgttagcaatgtgggtatttatatattctcatcacccttgtattattttgtaccattggattattttatttacctctgtcaaattatttgaaggttcactttgctgccaccaaggactcattatctcgccatttcaacaagtttggtgcagttctaaaagtagtcattgtcactaatgctgcaacgggccagccaacagggtcagtttaattttaaattttaatgcttattatagctgaggcaagcctttaccagagaaagatttataattttaggaaagtgaaattacaaaagatcttaacataactgatacatgcattatacaatcaccacacccaccaattcctatgatgctaacacacccttgtttcgtgctcagattaactcgaaagttctaagaaaataatgtgcattttgtctctagataacaaaaaaaaactgataagcaataataaaaggagaagggtcaaaacaaaatactccctttttggaagtaagtcgacactaaggtcttcaatatgacacatttgtatatttgcaggttatataggtacttagcagtagataatttcccaatggcaaaaaatgcaaataggatctgtcaggacattttataccatactacactaagtgtttcatgaacattaaatatataataattggtcatattacataagcccctctacttgattgctcttagcagatgtaatttgtgcagttcgagtttgaagtcctgaatcgatgtttttgagctgaattatgtttgaatgtcactgcaattgatgcagctaacatagggacttaattatgaactcagaaatatttgtatatttcttgaagagaagtagagaaatcaatgagtctttttctgttatcatacaggtctgcctatgtagagttcttacacaaagaatcagctgaacgagcgttgtcgttgaatggcacatcatttatgactcgcattctcaaggtatgattattctgtcttttgaattttctttagactgccatttgcacttttctaccataggcatggcattgtttaacatggtattcgagtagagttttaaatgttaatatggacgctagttctcttaattggtgaagttttatgttcttatactggcatcttgttgctccgctcagcgtagttttagattcccagaaactaattactaaggtgatgtttgtgttgcttttcctctaatgtaggtcgtccggcgaagttctcatgaagcagctcacttttatggttggcctggtagtggacggtcatcattatatggtaggcatggtaggatggcatacccaagagctgttctccccggtggttcctttagagggcgtgctccgatgaaagctggcgctagaagtttacagtggaaacgggagccttcaggcactgattcaagtgcaggtgcgaaaactgacatgagtgtgccattttcctctgaacaggtgctcccacctgcaacatagggatattatagttgagctgatataatgagaaccgaatggtatcttactcatcgctcctaatggctgaaaatggacagcaagctgagaagattgttccttcctgctgcactgtaaaaaaaagtccaaaaaaagcatgaaaatacaaaaagctaaaaataaaaaaatgtgggggagtttggcatcagaatatggctatcattggatttggtcctcttcaccatatgcgagtaggctgacagcctgagcaattttctatggactccagcaatctgaagaggattcacatttgaaataatcacaactttttggttgtgttggatggaagatgcttatcaagtagaacaagatgggcagattttggatgaggtatttggtgataatctgggcatcatcgatgtaagcctcaactgtatagaagtaacctatctatttgtaccctaatctgaatcaatctctttcccaacaaaaaaaaaggaaacacaaaaatgtgttgttctctttcatttttctctcatgaactgtttatttattgtactgagttgattttttagttggacattcattttttgtcaaatggtttaacaatacttgttctgtgtggtctgttctacctgactattccaacatttcatgttttaagttacaaagtccagtttactatctgatgagtgacaaatgcagtttaatcttgggatgtcttgccatgttcttgtagatttatggctgggcctacctgtttgaatctttcttgcacattatatgctttgattcaatgatgcagctactcatgtcatcatgtgttggcactgctcgtcgttgtagactttatgtagctagccattagttgtttatggtccatgctttgggaaaagtattttgctggggggcttatataataacttaataaaaaggcaaaaaaaatatcgacgaccttttcttctttatcgattctttggaatcactatgcttctgtggtgaacggctttggttctcggatgttgcgggtatggttgcgtaagagcaaccattatgcatttctgtactctcaagtattcgggtcactttaggttcaagtatttggtgaaggatatacttgatatgtgcacgatccatgggcgtttcctctgctatgtagttgtagcctagctatgccta

SEQ ID NO: 4829 - DNA, 4745 bp, Sorghum bicolor
aagcttgcagttgggtgctggtgccgtgctgggctgggtgtttcgcgcggcagtttggagcccaaggcctccgcgtcggttggagcgcgctccatcgcttgggagttgggactgattgatcaaagcgcgggccatgattctcctgtgcttgggagttgggactgagcccgcccagttgaggctgacagctcccctctcatgattagggcggggccttgttaggacagccactgattattctgagatgctgtcccattaagctaacgacagtggccgcccgccccaccctgatacgtagccgacgatgaaacgaaccgccgtctcgtctcgtcttcgccgcaccgacacggcgtccccgtccccgtcgccgtcgtcgtcgccgcatcgcgtttggccgcgacctcacgtaatcacatcggccacacacgccttcgtttcgtcagtgccattattggaagtatcagttcagaaaaaaaggccagcgtcgtattcagatttcagagtttcagaagacaccgacatgcactcgcggccacgtggactaaagaaagggaaacaagaacaagaaacatgtgagaatatcatcagaacattttcgcatttttttttgcttgtatgatttgctcggtgacaccacaccagacaccagtgcaaaagctggtgtgttacaaaaacttgtggccaccaaacatgtgcctgcaggaaaccgaaggttcccttcagttcagactttcagacctccacatgtacgtactgtagtaacaaaattctcaacaacggccactgaagcttctgttcgatctcacagactcacaccgtttcaaaaacaatacttactagagtataatattacatagcgcagtagtctcagcagggaaaaaaacctgcagatctctaatctgtttgtcacattgtctgattgtgtcagtcccaaggaagaagaccttccaataacccaggccttgtttagttccgaaaagtgaaaacttttcggaattgtagcactttcgtttgtttgtgacaaatattatccaatcatatactaattaagatcaaaagatttgtctcgtaatttacagttaaactgtgtaattagtttttatttttatctatatttaatgtttcatgtatgtgccataagattcgatgtgacgggaaatcttgaaaactttttggttttcagggtgaactaaacaaggccccagcagcatagaattgaacatgagttggttggtggtgttgggcgcatagacagacaccatgagagctggaggaaagccctgttcgcagaagaaaaaggccgaaaggccacacagcagtggttttgtcagtacgtcacatgaacctcccggctccttttcttggatcaccacaattcggccggctcttttttgcttttgttattcgcacaggtgatcacattctgaaattcctcaaaacaattctcctctcacctctctctctctctctctctaacaaaaaacatctatctactttcaagctggaccagaacaaactctaggaaaaaaaaagaagacacatcaagagcttggtttgagaaaaggcacatgcttacttgcaagccttgcaaagctagcaaggcatcatcaagaaccagagaaaccgtctcgttgcagttttatggacgctaatcgcgccagtaatgatgagcaaaatggatttacagcagtcactcgggataggatatataggacagaaatggcagctagctccagtccccacctggctggctggctggctccccctttccagtgccgcagtgtgcagcgtggtgtaccactgcacctgcccctcttcggctcgagcggagtgaggagagaggtggcacgtcatttgggccccacctccagcctcttcttcctccaccagctgccaccccaccccatggagcctcgttatcttttactactccatccatccccacaacgcaccaccttttatatactagcacactcacccccaccccaccccacctccattcctccaccgtcctgctcggctttctggcatcatcactcccctgctcccgctcaggtcagtctcctactctcctccccgtctccccgcctcttcctctcgctctgcaatcgaatttcattccaatccatgccgcaatgctcaaagcttgtgcttttcttggcatccatctccatgtgctgcaattttggagtttttttttacttctgctagtagatcagagacgcttagggttcacttcgctgtgctagtggcctagtgcagttgcggctgcggctgcatttggatctggctcaccttgtttcctgacccgaggaagaacagatcttcctggtgctctgtgctccgtttccttcaagctgacgcaaatgtttagcagtgggaatctgttcagtttcgtagctggttacttgctccttcagattccggctctcccgtgccgcagagatctgcaggagaggtgtcggtgctgttcggttcatgtggtcagtagtttattatgtcgcgtcttgtgatttggtaggtggaatctgacacttctataatgccggtcaattcggccagatcgaggtcatagatgggtgtttcttttcttggcacctgtatttgtctttcgtggtgatagggaaaggtgtaccaattattctttcaggctgtgctcactcctgatttcaaatcaaatctgtaccacaaggatctgaacaccagtgttgcagtttcagatgggagcagctttgttctttacctccgattgattgatttctagagctgaaacttaaggctatggtagccgattgttctctatctacttaaaagcaaaactaaaatttcttcctatgtatgaaaactgctaccaaggttggttaaagaaaagtagcaaatagcaactttgtgaatctgaagaacaaggagttaccaccctgccaattcagagtaggaaccagaccacaatttagatctctcatagctgactagcaacttctagcaaatagcaattgtatgaattcagtatatacttcttgcctatctctgccccccaacatttttacttatgtttgcagcttgtcagtttagaatttgcaaaccaagaacctggtgtgttagttttttcagatttttatgaagaaagcatgatgagatattcagtgtctaatgctgcattcttcttgtgtgacctcagggaattcattcattcattcaagtggaggcaatcagattctatgatggagttcaaaactggcatttttactgtggccatactagccattgtgctgtcctcaccagcagttgctcagaagagcccacctgctccatcagctacaatccttccaccagcgccagcacccgcacctgcgccgcgccatgttgacctcgctgatctcctcagtgtggccggaccgttccacaccttcctggactacctgcagaagaccaatgtcatcgagaccttccagaaccaggcgaacgacacaaagaacggcatcaccatctttgtgcccaaggactctgcgttcgccgcgctcaagaagacaacatttgccaacctcacccaggaccagctcaagtccctgctcctgtaccacgcgttccccaaatactactccctggctgagttcgacaaactgagcactctcaacccagtgaccacctttgccggctcgcagtacacgctgaacctcacctacaacatgggcaccatccaagtgaaatcgatgtggtccaaccccaagatcagcagcagcgtgtactcaacccgcccggtcgctgtgtacgaggtcaacaaggtcctcttgccaatgcaaatcttcaagagcgacccaccgctggcgcctgcccctgctcccgcccctgactccaaggcctctgatgttgctcccagcccaaggtcagggaaatcagcaagcgcaaaggcgaaggcggatgagaagagttcgtcgcaccaagttggtgccgacgttgcccattacctggcgcttgctgtctcaggtgtcctgatgctgttgtggtgagaatcgacgtgctcctgaccatgtcaaagcacagggttcagcttaggaagcttcccccgtgtttaatttatatatgggtttttttctggattcattcttttggacatatggtaggcatttgtgttaggattgagctgttgagtgtttgcatcatatgcttctatgattactcgttgttgatactcctgattcgatgcatgtatgcagaaagtatttcatacttgccagtcatacttccaacacctagagctattgagtggaatttgacagtatcatgtttgccacactatactgagtggcaggatgatcacgctcgaaaattgaatcggttgacagttaaacagcatgctactgattggctactgaaaatattgaacagcataaagtgcaagtgatcagtgattgaaagtcgatgttcagcagtaggatgatggcgctcgaaaatcgaatcgtgttaacagttaacgacatgctactgattggctactgaaaatacgatcagttgctcacagcagccggaattgacttgcaattaattgatcaaatagttgctcttcactcctgaatttggtgactttgtcaggaacagcatgaagtgcgagcgatcagtgatcgaaagtcggtgttctatcacatacagttatttatcgtttgactgcaagatgtgtctgatatcgtaaaacttgccgatatcccagaagattaatttatggcatcacctctcttctcttcatctgt

SEQ ID NO: 4830 - DNA, 5345 bp, Sorghum bicolor
agagacaattttgacccacctgtgtaaataaaacgaggtgtctcctaaaattatttttaatggtttttggtaaatctaattaaggttttcggtaaatctaattatttacactttcgtacgtgaagatccagtttgtaacaaaaatagtgtcaatagttcgttggaggtctaaagcaacatatacactacaggtaagtccaagtcaagtcatcaccccggccggtcgtgtatgagactatgaggccactaataattaagctggtggcttggggcctaaacacacctttagcgctacgactgaatcatgtagccatttgctaaaacagagaatataatggacgcttcatatttgtttgggtgtacagtataataatctgtcctagttgcaaggttaagtgcttattgtctaagtgactagccagtagctaccatctaataaatttatgttgttattttattcttgttgtctgattttgaattctatccaaatcgttgatgtctttgaacccattgtagttttgttgtaccgtcagcctttgtgtacgtagtttaattttctgcgaggcgaaataaaaaaatggatgaaaatacgtaggttaattatacttctgtttttcatttatcttatcagattattttggcttcgcatacatagagaatatttgtaggaacagttagaataaattaggccttgtttagattcaaaaagtttttggattttgatattgtgacactttcatttctatttgacaaatattgttcaatcatggagtaactaggcttaaaagattcatctcgtaatttaattgcaggcaaactatataattaatttttgttttcatccatatttaatgctccatacatgtgccgcaaaattcgatgtgacagaaaatcttaaaaagtttttggtttttggtgtgaactaaacaagaccttagtactccatctgtatcctaattagatgacgtttaggacatgagtacgattaccaaggggtgattagttttcctgtcttgcccttattaaatacagcgcgcggtgctatttatataacaatcaattgtagctcagctgatcaagactctatagcctgagcctagagggcgatgattcaaatcctggcagcagccaagtgtactaagcctcgcaaacgtgaacgtcatctaatactgcaatcggtgtgtgctctggaacgtcttctatttaggatatggagggagtatggacaactgcacatacaccctactctcaaaatcaatttctagaaaaggttgctgacacatactcatgcactagaaatcatttttcacgaactataaggattctaactataaaatttttgatcccggccgtggagcactactacaactttatataaggatgtctcgacctaataagtttgaaaaatctaaaagtttgaatttgaaaatctgacaaagctctagatggacctctctctctcaagtcaactcatggttttggagacataaacaaaggacgactgactggcaaagctcaaacctaaggccgcgtgacgaagcacaattacaacattggatgcatggctagccgctgataaacaaattgtgagcaatactgatcttctctggtagtggaagatataaagtaagtttgcaccataaaatcagtcagcaagtcaattcaccgcgtgcgcgttgtttttgctttcattgacggcgttgttttcatggacggcgaaattcacttaacttaggcggtgtttggcagagcgccaaatcctaaaacactgatccgctctcagatgtaaatatagttcgtcttggtccttggcgtcgtgctactattgttttactgcagaaactgtgtatggcatggcctatttatggtgaggaacgtaactgatgaggacgacatgggtagtgcttccatagccaaacaaaaagaaaagaaaagaaaagagaagaggccattgttgttctttgtttacgcttccataatccatatacgcagaggcacacatgaataccaatgtagtagtggctagtaaaacagttgtagcacttgctgctctagtcgcgacgacgctgccgatgctcccacctagcagcgcggcacaagcagctgcaactgcaactacaacagccactggtctgggcagtactagctgcacaaggacctgcggcaacatcagcatcccgtacccgttcggcgtggagcctggctgctaccacgccgccggcttcaacctcacctgcaagcagcagcactcccaccaccaccatcatcagccacccaagctgttcctcggcgacggcaccgtgcaggtgctagacatctctgttgaacacaacacggtgtgcatcaacagccccggcgtgcagttgcagtatgatagcattagccaaattggtcctgctaacgggacatggggcctcgggctcccaaagaccggaccgtacttcctgtcggagtcagctagcatggtcgaggcgatagggtgcagcatccaggtcagcatcctagggggactgaataacagcctggtgagttcttgcactgctatctgcccacttattttctccaaaggtggtggcgtcagcggaacgataggaaatggcaactgcactggcattggttgctgtcgggccagcatcgttgtaggctactcttcctacacaatccagattgaacgcatatctggcccgggctggtacgttcctacttctgtattcatagtcgaccagagtttctttgtcagtatcaactcgaatggagaacgaattcctggatcccttactacggccacactagactggataattggtacttcgacatgtcctacaaacaataagaccgccccagaatgtctcagtagtcacagctattgccaaaattcctcttcgttgggccatggtgggtatacatgtcaatgcgcaaatggttatcaaggcaatccttatgttcatggtggatgccaaggtacaatacgtagtgactaactgactatatatagcgaatcaatcttttttttaatttaataattttatactcagcctgtctacagaattaatctgcaaacatactatttagtgtccctaacaaatacccttgttttgatatagatatcgacgagtgcaaataccccaaccaatatgtttgctatggtgtttgcaagaatacaccaggaagttatatttgccaatgcaacacgggctatacaggcaatgcttccatcccaaatggatgcacaggtataatatggaaatcatgaatttatacatttacgactatttgttctagagttacaaggctctctgtgtactgaacacgacactgtgacatgaacttaaaacatacttcactgttctaaatttcctagacattgatgagtgcaatcacaaggaagcatactcgtgctatgggatatgccaaaatttcccaggaagttttcactgccaatgtcctgaaggaagctctggaaattattccataaaagggggatgcattacaatcaagaattccttcacaggttacaagtcactatgcactatcccacaaactaatatcctttctcacctcacccacagaacaaattcacagcttgatatattattttattctagaatcatgaacgggttcctttatatctcgtttttcttaggtttaagcattgggctaggagttggtggtgggacaggtcttttgcttctagcccttggtggaccctacataatgcataaaatcaagcttcaaaaggcgaataaggtgaaacaaaggttattcaagcaaaatcatgggctacttttacagcagttaatatcacacaatactgatattagtgaaaggatgataattaccctaagtggtatagagaaggcaacaaataattttgacaaagctcgcatcgttggtggtggagggcatggtgtcgtgtttaagggaattctagatctacaagttgtggcagtcaaaaaatcaaagatagtagtgcaacgagaaatcaatgaattcataaatgaagttgcagttctttctcaagtaaaccatagaaacgtggtgaagctcttaggatgttgccttgagacagaagtcccattgctagtttatgagttcatttcaaatggaaccctttgtcatcaccttcacattgatggccccatatcactaccatgggatgatcgaatgagaatagcaactgaagttgcaaaagctctatcctatctgcattcagctgcttcaatgccagtgtttcatagagatattaagtcagcaaatatacttcttgatgatgctttaactgcaaaggtatcagattttggagcttctagatatatcccgattgatcagacaggagtgactacggtagttcaaggaacaatgggctatttggatccaatgtattattacacgggccggttaacagacaagagtgatgttttcagttttggtgttcttcttgtagaattgcttactcgaaaaaaaccatacgtctacaggtcagtagacaatgatggtcttgtttcacattttgtctcactgcttgcagaaggcaaactagttgacataattgatcctcaagttatggaggagaaaggtggagaaatccaagaagttatcacactagcagcaatgtgcacaaaattgaagggagaagataggcctacgatgagggaagtggagatgacccttgaaagcttgctagttaataagaagaggctggttcaatataatggaacaccaatgagtaactgtggggatgaagctacaactcattacatggcaattggtagagattgtaatgaagctagcaggcaatacactatggaagaggaaatttggttatcagcaagttatcctcggtgaatttttgttagtactatgaagatgtgcacttgatatacatttctaataccatagtgcatatcaagacaaaaaaaagttgtcatgtcttctcatcgaaattactatgttgacaaattttcatggaatacattcagttggtttcggtttgcatacttccatccattaatgtatcataatcctataattcttgatactaattttcatatgcttatttcttgaagcaagagtattggttatgagtttgcaattctgcattgttgagggtggctacagaataacatattttgtagctagctacagaataatatatattcaagaaacgaaatgaaccttgcaaagtatatttgtatgcactaaaagttgttaagacaaaactcacaaatgcaatctgcaatcgaggaaagaaatgaagcttgcttgatgaatgagcgtggagcacatgcttactcaagcgcaatctgcaatccttttaagtgtgttccacatcattcaggttatgg

SEQ ID NO: 4831 - DNA, 3040 bp, Sorghum bicolor
atagcatggctaaatgggctgacactatatcgacccgaatcttccttgtcactggatgtcctcaagtaaaccatagcagatgaatcgcagagtgccatctctaagaacccattctctaaaaaccctaactcctcgctccctctcgttctttctcacgtcctaaagtaggcgacgcagctcgtcctgacctaggcggtgctgcttcttccgatgtaggtggcgtgaccccacagagcgtgtggtggaggctgcatggccctgcttgtggcgaaggaggcgtgactccatgagcagaatcgacacggtcgatgtagcatcacgggatggtgatgatgaactaggcaacacaactccacggcgaggcaacgacggagcgagaggcgcaacaacaatgactcgatgagaggcgccgccccgaatggcctatagtgctcgggctagcacgaacacgctaggccagcctcgcctagaagttttagccatggaagctttgttggtctagctctctattcagtctaggccttcctaaacattttcttggatctgttaaggcatagtattgtggtactatacgtaccgtccatttggctatttatagggcacactagtccaaatccagttattacatcaaataatagggattaattgtattatctaaaaaaaacatctaatagggatcaaacaccactaggcttgggtaggctaattttttaatctggacctaaaattagtctcttaatccaaacagggccacagggggcatcggctactgcactgcagttggacaggcctcagcccaactgagaatactcgctagcagggcctctcctctcctctcctcttcatcatgcatgattgcagttggagttcctcctataccgccgacagtcttgtctcacagacacaagcaaacaagatagattttatcgccattgcgctgtccggctgtcccggccagaggaggaggaggagggaggagcggagccgggaacagaggcaggacgctggacgcccacatgggcagggcagggcaccagaagccctgtcacgctgaacagaggagagcagagcaagagccctgtagtagacggctggggctggtgcggcttggtgacaagacagagaacagaatgacggcaaagttaggccttgtttagttctgaaaagatttcggattttggtactgtagcattttttgtttgtttgtgacaaatattatccaattatagactaactaggaccaaaagattcctctcgcgatttccagctaaactgtgtaattagtttttactttcgtttatatttaatgcttcatgtatgtgccgcaagattcgatgtgatgggaaatcttgaaaactttttgctttttgaggtgaactaaacaggtccttatgatgagagacagttggagggagggatagcctgtctttcccatttaaggacactgccctgccctgcctgctgccgccaccccctctctctccccttcttcctcctctccaacgccagcaacacacaggacgacgtcttggcgtttctcgcggccctaccctaccctaccctaccctacccggtgtccagtccagtccagtccggggtcctccccgctcgtccgtcgtctcctcttctcctgcctcctgtgaagtgaagaaggccaaggccaggaccaagacgaagacgaagatggtggccgggtgtcagaggcttcaatgttcccttcatcagaagctcgtgctcgtgggtgtccaactccaggaagcaccacaggccgccagggaagcagcaatggcttcttcagccttgcattgatgcggcacccagagcaagcataaatatacccctctccctctccctctccctcccaagtctcaagctgctcatcgccctcatctcatcagcttctccctctctcttgctttctccatcctgctctctctctctctctctcggcctgaggcctcttgcgtcgatcggccatcttcgcactccatcccaccgccatggagtcctcctctcacatcaccggggaggacgacggagagggctgcaacagctgcgagtccggctggacaatgtaccttgcctcgcccatgcatatgcatggccacgccggcgacgacgctgccggcagcggcaagagcagcggcagccaagggagcagcgtcgacgacggctacggctacatgatcagccgcggcaaccagcagggctaccaacattacgccgacgccgacgacgacgactccctcgcgtccgatgcctccaccggcccagctaaagtgaagtcgtcgccatcgtcgtcaccgccggaataccaacaacgccgcaaagatgatgacgatgacgatggagggcatcatcatggtcatggcaaggagcaggaggaggacgatggcgcacgcacaaagctcgccaccagctcccgcaagaaagctgctgctggcaatggaggaggaggaggagcagagggcaactcatcaaggcgaggccacagcaagagaggcggcggctcttcaaggagaagcttcttcctctggtaaaacaatactattattactactagcttcgtttcattcactctacaccagtagcatgaatcctcctttaattttcgccattgttggtcgagctcgaaaccttgcttgttgttagaagaagaagaagcatcaagcaagcacgcgttcattctgaggagatagatcaatcaatgggaaggctatttttttggcccttgtttttgccttctccgtatggccatctcctcctctcctcgttgaccacctgtagtaggttcgttcattagccattgccatgtaaaaaaaaaatctactgtaacttctggtcattgttgttcttcagtgccctgtgcttttaatgttgcttgcaaatctccttctgtgtttgtagatattaattaatgaatgctgctctaactcataagctatatactgaccagatgggggttccaagttatcgtgtactccctctgttccaaaataaatcaacttcttagccacaagttgatttattttggaatgga

SEQ ID NO: 4832 - DNA, 11641 bp, Sorghum bicolor
atttgaagtgttttcagatggtttcttgtgaagctgattagtctttcttctctgcagatactacgcgatcttggtgtcaggaccatgcggttgatgactaacaaccctgcgaagtacactggactcaagggttatggtttaagtgtccttggcagagtgccattgctgacaccgataaccaatgagaataggcgctacatggaaacaaagcgattgaagatggggcatgtttatggaagccgctctagtgatcatgcaagtggcagtggcttggctggtgctggcgagagaaaggagcaggatcagaatgacagtgccgacgtgcaaaataaaactccagaagcttgagtgcctaactctgcgtttcttctggcagtaaatagaatcgttgattccatttcaacaaccttttttcttctttctgatgctgagttttagccatatattcagttagcatggttgatgctaatgccggaactagtcagcggtctaaggagttcgggtctaaaatattctcatagagaggtaagctctcttcggacagtttgttgctttctttgggtaccagtgactaatttaactaaaggacaattgtgtcagtggtggcgtgatgtactacattctgcgtgagcattttcggctgatgttttttcgggctaatgttgttttgttatgagagaaaaacattataccatggttgataagtttaagcgaataaggtcgatatcttgttcgtttggctgataagccataaaagaaaaacattgttgaataactgcttgccacaagtgaactctaatgctttacttttaaagaactagacaccttatagcttatttatttttgcgtgtatataacggaggtatttgtggcgactaacgaggatataacgaacgcgaacgcaagtcacaggttgccacacacgcacacaggggcacgtgctctcacgcgagccatagagtcgagaccaccacattccagcacaataataacagtcactcagctcccaaaaaaaaaagtcactcaaactacgaactctatctggaccattccttatcctaatgataaaaggatgctacgataagattgttctacaactggaggtttagtcatcgtcactgaaataatggaatgagctcattagcgatgtcatgtcagattagattgctgaagaagaagatgaacggctcaaagtcaggtagaagaccacacttccatccacaggtaataatagggcacctgcaacagtataagctagtattaactctaagccgttaacatcttcaataatgctaacttctagtatatacatcataaaatagatgatcttaacactctcacataatttttatatatgtgtatgagtctatctcttgattaaggtcctgtttggttccccttgctaaactttaggtagctaaactttagtcactttagtagctaaagttccaaacacattggctaaaatgagctaaaatagtgtagttctattagtcacctaagagtagctaaaataattttagctagctaaaatttagcaagaggaaccaaacaggacctaaggctcacttttcgtcccatcatatcaaatgtttggacatatgtctaaaaatattaaatatagattgaaaaataattaattgtacaatttatatgtattttatgagataaatttttaagtctaattattttataattggacactaattattatgattataaatgtgctatagtaataaatacttttcttttcacgaagtcagcgagacaggagattatccagtgccagtgccagagctagaaacggaggatgggcggatcgctcaggccaaaacagcagcgttgtctagtcgaggggaaaaaaaaaaagaggaaaaagaaaaagggaaacggtctggttggttggttggtggccccgtgaacgtgaagcagcgaagcgtcccggcaaaggcaccggtggccgcgtccagcgcctatcgtttccggggccctctagcctcctctcctctcccccgtccgttctcctggcggtggggtgggggtgtggcctcctggctcttcctcctcgtcctcgccctcctctcgaccgctagctcacctccccgtcaccatataaaccctatccctctccggtccccgccttgtcgtgacgcgccccgcgccgccgccggcgacaagctcgcaggagcagcagcagctgccgccccccaccaccgatggcgaccgccgtggcgtcgcagccgcgccacctccccctcggcgccggcggagagcccaggtgcacggccaggttcgtctacgctcccgcttacgctgttgttcggcgccacgattcggcgtttggccgttcgctcgtgagcggagaggatgaattgggcgaatgtgttggttgtaatcgtggggttgattcaattggtcgtggaattgcgcgcatgcatcggcgtggtgagctggaggtactctgtgaatgtagcatttcggtggttctcaaacaccagagcttccagacgggtagcagtagtaccttgaaacggacttggggggcttctcaattgtagttagggactgctgtctctgtcttaagtagcttgtctttgacattgatttattgggctagtcgatggaagtcctgcgattatcaattgatgatactagaagatagcccatgcattgctgcgggaatcacgactgaattttagtggattttatggtattgctgatgtgaacaaataaacatatgttagtgaatgatgcagcttgcggacgtagatagcttgcatgaatagatagggccataattgcatgctctagtgagttgctgatgtggatgacttgcatgttgagatggaattttagtgaggtttaggatcataagatatagtatagccggatttcagtgcatttttttttcagattcgatgtattgatggtaagaacggtttgtgtttgcagcacatcgaaggttcatactctggagaaagtatatggtttcagattcctatgtagaagcgttgttgatgtaaagagccacaaattccactcccgcatttcaaagaggaagtgcgacttgaggaactcaccgtcggagtgtgacaggaccatccacagtgctagatggttggagtttcggagacacaagggactcttccagagaactagaaggatggttcacattattccattggcttctgacgatgatggcaaccgtgtatctgttaatggagctccgcaagttggttcgacaagcaacattgatgaaataaggttgaaactgaataaagcattgcagagtgaagatatcagcaatggactcgtccagtcagtacatgatgctgcgagatctattgagttggctttcatagagcacagcaaatcgtcaaagagctcatggtttccaaagacatggctgggtgttgagaacaatgcttggataaaatcactgtcttaccaggtacagtactgaacactttgcagagttacatttgcccctattcagtattcacatgaagaaacataacatttgcagtcactgttatctcgtcattctgatttttttactatatcaacacaatattaaagtcatgaaaaaggtaaagatgctgctacttataaccagcttagagccaagcaccataactgaacttgtgagcttgtgaaaacattccaattttcttagttcttatatgatatcttccaaggttcaaaaaggcgacgccttaggcacgccgaggcgcgactagacgctagtcggagggtgtccacctggcctatgggggtaggcggacccctaggctgtggtggctcgtcggcggtgccggtgggggaggtggagggggtactgcggcgccccggtgtccccacgtgcagatccagtgacctggggacgaggcacagcagagagagccggcagcagaggacgaggcacagcagagagcgtcggcggcggcggcggaggtggcaggcgtggctgggaagaggcgggttgtggtggaggcggcagggaggaggccgacggtggtggatctggcggcgggaggaaggaagaggcgagaggctcggggctggaagagatgcgtcgagcgggtgcgagactcgggaggaagagaaaaggaagaaaacgaaacagagcatgggagaggataaggctttggtgggggctgtggagggagagttgggccattaaatgggccttttcttctttctcccccattctgattttctatttttttcttttcttttaagtatatttaaatatatatacatgtattagctaccgcctaggtaaacgtcttgaaacgcctaggctcgcctaggctctaggctatgggtcagcgcgtagaaaccgcctagcgccttcttaaactttgatatcttcaacacactcactgcttttgtgcttgccatagtccaaaattcctgtgagatacatattttccatccactgaaatcttacagaaaatgtttgcaggctgctgtagactcattgttgcaagcagttattgatgtttcatctcgtgggaatggcagagatagagatattaatgtatttgttcaacggaggtctaccttctagccctttcctttgctgtcatatcgtactgcgtaaatgttgttttggagcagactcatttgtttctaagtatagatatcccttgcattgaagttttctggggggcaacgtcctattttaaaagttcctttacacctaaattaaattgttaagataagatttaagtatgccttttgatttattggctgattgatctcagaagaggttgaatcctaattggaaatttactcagtgagaaacaaagttactgctgaggtctatagtgctaagttattgttgcattttttgatccggaagtagtcagcaattttcagttagcaaactggcaaactcacatgactgaagtatattaatgaaaagagtgcaaaacaatatgtgactaggtggaatactattaaattattaacatgaaggtgttggtgccttagttctattcactttgggtacatatagttaagcaaaagagtttttaaatgtcttgcatggatttaacatgcatacttctgccaaagctgaagcatcaggaataaggttgttttcataattcatttatccaaaatgaagatgaatctgtatcatattattgcttttacttgtaggcttgtagtatgttcaagttacattggattcatcctctctgttatgttatgttccatttgttgggtgtctattcagtgatgttttacttgattgcagtttgtcccgcctgctcacccccctcgagagtgttatcaagaatgaattgtctaagagggaacctacattgtatgaatggtattcgtccaatcaaaatcctttggtggtgggacaatttgtaaacatttttgaaaaggatccaatgtttaactctgctacagcaatgtaagttctattatatcttttggactgtaacatgctcatagcagtaactagtacaagactcatggatattttctcttgtttgctgtcagatgtcgtgaaggggagccaatgaatactagtgaaagtgatctttctctgcttatgctaggattgatctgtcttgctgcaatcacaaagcttggatcagcaaaagtttcttgtcagcaattttcttcaatggtgcctgatattattggtcgattcatggatatgcttcttgagtttgctcctctaagtaaagcatataacttgacgaaagatattggccttcagagagaatttttgtataattttggtcctcgtgctgctgttcctaaacttggtaatgatcatgggcttgagatatcattttggattgaattggttcagaaacaattactccgggcacttgatcgtgaaaagatatggtcaagactgacaacaagtgaaagtattgaggttgaaactaaaagtgatcttttcatctagtcatagaaatctcgtcctttgcttcaaatttaatagttatttattcctcattgcaggttctggaaaaggatcttgcaatatttggttttttcattgctttgggtagaagcacacaaggatatttgtcttccaagggtctgactgatttggatgattcactgaatggtattgtaaggtaagatctatgtgaatttatatttttccattttctcactgaaatgacatttcagttaataagatgatataccttctttattacccaaatatgatttactgtactgaatcatgggcttgcaataacccaggtatcttatcggtgggagtgtactatattatccacagctgtcctcaattagttcatatcagctgtatgtggaggtcagtatgcaggcgatatactgagcttctaatgctacccagcattcaagtgttcatgtgcctttcttacgttcaggtagtctgtgaagagctcgagtggcttcctttttacaatgatgatgttccaagtgcaaaaactgatactgaaggcagagaagaagtgtctaaaggagaagtcatatcaagagtcctaaatgtgtgctcttactggatgactagttttataaagtacagctcatggcttgagaacccttcaaatgtgaaggcggcaaaattcctttctaaggggtatgtaattatttggtcacgacaatgcttatctttctcttgtttgcagatagggatttttattttattttattttttgaaaaagcagatatggatttatgagtactgattaattttctactgcatgttaataattgtagacatgccatgttgagtgactgcatgaaggagcttgacatatcaaggtaagccttaagaaggagcttgaattgtttgttctctaccactcagtagatttatttgtttgctaaacatgttgcagaaataatatgtcaaaaggctgtggcttcccaggacctgaagaagaattggatactggaacagagttagcttcctttgacaaggtatttattgcaaatgccttcaagaattgccaatgtattttcacatttttgcacatctgaaaaaattatgttctatacgatcgatataattcttagtatgacctcaaaggtattaatggtaactataaaatgctgtgtctttgtatgtttcctatgcctccacagcaaattagagaactactattatagcattgactctatgtacccagcaaacctctaagagatgatctcttatctacgagataacattcttacatacatcatatgctctcctagtttgcttcacctaagattttactgatataatagatggtccaggtggcactatcgtacatgcccatagatgtattgaaagatctcacgagtaaaaggatggataattgcatatatggtggacagatatcatttgcaattaaatccattttggatatgccgtctgcttatttcaagtttatgatgatagttgcctctaaaatagatgctatcttcagttgttgaagcattgacgacatcggttttaatcattgcagtcacttgaaagtgttgaagaagctttggttaagttagaaaatttgcttcaagaattacacgtttccagttcgaactctggtaaggaggatctacaggctgcatgctctgatcttgaaatgataagaagactgaagaaagaagctgagtttcttgaggcatcctttcgagcaaaagcagaatatctggaggtgagccttttggctttcttttattttcagtatctcttacccacacatgttgcttctaataaaggatagtcatgcattattacaattacaagtctttgatctcattgtattgggaagagttaattttatggatttccagtgcactccacttatcatggtcagtccatcaggatactgccaggcgagaacagttactccgattacggtagctcatgaattgcataagtttgcttctgttgttatcttagccaaaatatgatttagttgcattggttagttataggatcacatcagatgcatctcttttcaattaagcaatgggaactcaatgtaattcccatcagtgtctgtaatcctcctgttggtttcagcttatgcttttgtcttctggtcaaaaggcagaaggtggaaacaaaagggctagattttgaaattggtttttgagaagcaccatatttgtattagaggccaaaagcaagtctgaagacacttttgacaagtgaaaggaatttcaaatgctaagcagcggtcaccatctgtctatccttctggtggtgttttacagcataatgatatcagattattatgtgcttaatgtaccagttggaaacagtacatgccaaactgcatacttggttgcactacagttggaactagaattagtttacaatcatggtaaatgtgctattttttatggtttattaggccgatgcacctgcagaggaaggacgtgtaaagacaggtagcaggacgaacgatacatcagcaccacaaaaatcaggaagcaggtggagtattcttctaactaatactaattaattaaccaattcaaacatggttgtgatagcttatgtgatttcggtgtagtaaaatagacctgttcagttatttcctatttctcttgtagggtggataataaacgccgtccattttgggacttctttggtcggtctttgggaaagaaagttgatccagctcttgcagatcaggatgtatggatgctgtactgtatatttgcagtttgttttgtgcattaaagaacacaccagcattttgtggtgaagcgatttccatgatgcatccttgtttaatgaacagtccttgaccatggctctaattaattactgaaaattaattatggtcttcagaagaataccatttaattttatcccttaagattcttattgcagcgtattgctaatcttatggtattatcccatttttattgctgatgaagggcactgttgacaatgtggagaagaaagatggggagtcaaatgacatcctccgctttgaacagttaaggcgtgagctgattgagttagaaaagcgggtgcagaagagtgcagatgaagctcaaaaggaggaggtatgcttgtttaacaggatcttgaaatagcaaattactggttcttcagtatttgagcaaactcttggaacagcagcagtgattctgtaaatgttatgagcttaattgcatcttgtattgttagttctgttgttttctgagttatgattcttaaccacaatcgttggtttcattgtgtacaatttttttctttttcaaagaattgtctattcagtcaagtcctgttttccaggagatggttgtcacagacgaaataattgcgccatcacctggttcatcagttccttccggccaggctaccaagaaagaaaatgtcataactaaatcagtggagaaggtcaaagagactacaacggtatgaccatctatacctaagatcccatagtagtaagaaacacatgctagcatatatttatgaactctgcaaggttttcttcctctgttgtggctgacgataatgacacttcaaggcatggtattgttgtgaaagattgtagtagggggttgagtaatcgaattaaatttatccaaaagcctatttgccaaaccaaaggcgctcatcacaatattgttagctccatacgtcttataatttggaatggagggagtactagttataagaaaacttcttgtttcttattcttttttttttctgcacagactgtgttgcaggggacacaactcttagcaattgatacaggagctgctatgggtttgctaaaaagagctcttattggggatgaactaactcagaaggaaaagcaggctcttcaaagaaccttgacagatttggcatctgttgttcctataggaatactcatgcttttgccagtgagtctttcttgtacttgtatttctacttcttaaacaagtagaggcttattaggtccactttatcatttcatttaatttgtgtggagtaatctttttaaccttttaccttatctgcgtggactgtgggctactaagactcattttggtgtttgaattgccatgtcaaagtattttgttgtgtctaagagtgatgtcaatcatatactctgacctttgaatctatcgactgtaaggtgtgtttactgctggagcattctgacaattgcctttctgtcccagctcaccgccgttggtcatgctgctattttggctttcatccaaagatatgtgccatcgatggtatgtagtttacgttcacacactactctccccctgttgccatttgttatataattcctatttgtgtatttgcaatcgtgtagatcccgtccacatatgctcccgataggttggatctccttagacagcttgagaaagtgaaggaaatggaagttgctgaaggcagcagtgaagatatattggaggccgttggttcgagaactgagcaagtgaaataagctggccatgtacagatggacgattatactgcttagcttacgatctttcctgtaaagtgtaagtaacaaattcacccctggtcttctgcatatggctgcagccttttctttcttgttgtatacatgtgttgcactctgtttagctctaatgcagaacagctcaaccatagacatcgtgcatataaattaccttgacaactgaactggtccttccataattttgtgcagatatttgttcttctaattatttggttaatatattctcaatcatgttttttttgtagtgttttggaacacgacatgaggggtttattttgtttaaagattctttgaatgacacataccgctggaaacagaactgcaaggccatacgaataaccaatcatcgggtcgataaggcgaagaaagatccttccaaatgctccacgtctgtaggctgtatccatacttcacagtatacatgggcgcatggtgcccttcaacatagtagagggtgaatgtccaagctcctcttgggcagtctgtgtagggtagtggttttggtagaggattgtatatatagttaatatgttgtgttgatgatcatttttttctcatgcagcctccacctggagggggagtaaaaccttgtaaccttgttttttgggaaccaagggaatgcttcattccctgtatccaaattgccaagttcagtgaactagttaatggccaagttttagagccttcataaatcacacgcttcagtggcggcttacgggcgttttttctaatatgcgaccaattggagcgcatcaggagcatgggcaacgatgcacaggactcaagtttgtctctttaatctgtgttgtgttattgcgatcgaattgccgtcgaggcctctttgaccgtcgaatgcttgcacacaagtgtttgaagatttttgtctagttaccctgtaactacggcgatgaaacttgagtttagctttgcaaagtcaatcatttccttcggcagttatttgcaaagcttgctgtactactacggtaactactcttgccttttagaacataccctaccatactacgtataagtacatacatgtacgtattttcaatcgatcagtggctcaacgctactcctgtctatttctcaaaaaaaaaaaacgctactcctgtctatctatctatataaaaaatacgtgtacaatttggtatggcagaaacgtgattaaacaa

SEQ ID NO: 4833 - DNA, 3760 bp, Sorghum bicolor
aggcagagtgagggtagggtgacatcatggtgctcatgcagcccatgatgacttgaccaatgggcccgacactggcatacaactaccaagtggcaagcgcggccaagtgtcggccggccatgtcgatgagctcgccctccggattcagagttcaaacaccgactgaaactcaattttgggcatcaatttcctcccaaatcattgaaaactaggtgaagtggcagttgacattcttggagaaagaagtgagatctccagctttatcaattagagcatgaactaattcggcttggtttgagagatatagagctccaaacaaaggtacatgaaagtgcaatgtagtttaggacttagtgaaatttctaagtgtccaaacaacatgcaattttgccttgtgggccatgtttaaccatattctgcatattttcataaaaaattcataaaagaacttttgttctttaataaagtttccactactttgcttaagtgtgcaccaacatgcaatcactctaggttggactttttaaacagtcaagcaaaagaggtttaggggtcaaccaaagtcaaactagcatttagaagcttaaatacacaaaatgaccaacatgaacattgttccaaaatatagtctaagcatagttaagatgttttagagactagttgatgtccacttgcattgatcacacatgagcatgggtcacacataagattataacaacattagcacatggaaaagcatgaaaagctaggcatatgacatgtgatgatgctttgaactaatatcaatgtcaacagagggaggcccctaaccaaagtcttgttgtgttacaatttttttgaaaaaactttgttgtgtgttctcctgataattgtcgagctttgatattgcaggttgcacaacaattccaatgctcctgagaagactgcttctacctgatgactccggtacccacttcatgtggccttgaatgagttcttatggtcatgttttttatcccccaatgcaaatgttatacttttgaatgaatggatgagtgtgatggtgatatggaggacgcaggtaggctgtttgatgaaatgcctgagggaactaccatgccactatgccaggcaggcggagggccgggaacaaggaagatgcaaagattgttgttccataagttaataccaggattgttctcatgtcactgatgctatcaggttatgcaggaaactccagaaaataagatagacaaactctaagaaaaacaacaccaaccaactccataaaacgatggggtgctactcaccagtactttttagggcaagtacattatattgctatatgtcaacgtatattgtgggggtgacgaactatctacaaaaggtgctacgactgactttagtttttatgatgaatattcacccagtaattaacagatggtctgaaaacatatgagaaaactcttatatatagaactcgtttttttttcattatacaagtgtcgtctattatttatgcgcacatgtcattaaacattattaggtttgctatttagattatttgttgacagctcacacaatgactgatctattgtattatctataatgatatgaaagcatattacaaattaaacctgtcatatagatcaccgtacaagcccttgccatgcaaactgcttgtcagctcacttttgcttgctctccctagctacctaatatagcatccccaaaactcaccacatgtcatatagttagtttgggcatctgcaagcatgagttctatctggcagtaagccattaatagatgatggaccaaatttagcgactaccaaactacgtacatcctccatgcaatctctctctctcacacacccctttgttcttccattattattggttcattccccacgcacgaacccatcaccctcatcccttgcttgtattaattcattctaggcaaggcgcgcgcaatcatcattggtataatccatccattattattgaccctcagcaacaagatgctaagttggctccgacgcttccctaacgatgtgatccataggaagggcggcaatggcaccacaggccggaggacctcctccaccacctcttggaggaacaagagcaacagcttcaccgcacgaatcatccgttgtgcctcctccgtcgtcgacacggcaggccgccgacacgacgacgacgacgacgacgatgatgattgtcgtctaccgtcgtcgcctcctcctcctcctcctcctcctccagcagcaccaccaaatgataacaacagaaacaccagtgtcgtcctcgcagccaaagccttctctttccgcgagctcgctgacgccgcagggaactttcggcaagccaacttcctcggcgagggaggtttcggccgcgtctacaagggccgcctgcacaataacattgctggtgaggaccttccggtggccatcaagcagctggatcgcaatggcttccagggcaacaatgagttcatggtggaggtgctcatgctcagcatgctacaccaccccaaccttgtcagcctcgttggttactgcgctgagggtgaccaacgcctgctggtctatgagtacatggcattaggatccctcgaggaccacctgttgttgcttcctgccgatgccgatgatggcagccaccagcggcagcctctgccatggcgcacgaggatgaagatcgcgctcggcgcggcgcagggcctagagtacctacatgaaaacacagtcatctacagagatctcaagtcctccaacatcctcctcgaccaagactacagtcccaagctctccgacttcgggcttgccaagctcctccccgccccgcgaactgactactcatcgtcgtcaagcagaagcagcagcagcagcagcagcaaggtgatgggcacgtatgggtactgcgcgccggagtacctgcggacaggaaagctgagcgtcaagtcggacgtgtatagcttcggggttctactgctggagctcatcaccgggcgacgagccatcgacgccagccggccggacggcgagcaaagcctggtgggatgggcggcacggatatttggtgaccccaagaggttccatgagttggtggaccctcgcttggtgatggcaatgcgagtgcctacaacgtcagagttgaagcaggccgtgggtgtggcatccatgtgcttgcaggaacactacgccctgcgtcccgtcatgaccgacgtcgtcgtcgccctttccttcctcgccactgattctcccccctgctaatagctagctacctcatttctctctgtatatatatgtaaattttggttgttttatatgtaaaaaaaaatgggaagaagaattacatcacaacctagctagttagttttcgtggattagaatataatgttaatgcatacatccttgttcactaatgggccattcatgtagagcagaaccggcctgttagtgcaccattgctctatttagttagtgaaaatttttggttttggctactataacatttacgtttgtatttgacaattattgtccaaccatgtactaactagatttaaatgattcgtctcgcaaattacagacaaactatacaattagttattttttatttatatttaatgtttcatacacatgtcacaagatttgacgtgacggaaaatctttaaaaaaaaatgcatgcattatattgttgactggatcgtggggcatgcttatatatatagtaaataggtacaaattaacaaatgggtgaaagccaagagaaa

SEQ ID NO: 4834 - DNA, 6789 bp, Sorghum bicolor
acatgatcaaactttgaataatttgatttagaacaaattaataaaagcgcctattttatatttcattcagttcatgctcaaacctttccaaaatataatataagttgttttgatttttctgatacatccatctttgttatgcacatctagacacatacgttatatctagacgcatagcaaaatggatatactaaaaaaagtcaaagcgatttataatttgaaacatagagagcagatgtgaaagatcactgtagttaaaagaatctttgcaagttgggattttttttatttttgtttggaaaaatggaagatgagatcgatgagagtccaaatgccggtactattaggaggctgctaacgaataacaattgtggtaaacgatgccggtactattatatgcagttagggtcaactaacatgtgtaataagcacaactgtacaagatcatagtagtagatgttgatgtactatgacgtaggagtaggacagcctgtcaggactcttctttgtcagcccggctgaattgaaaaggatgatcaagtcgctggctgcttgaaaacatgcagcagcaccgcagctgttttcattcctaattacaaagacaaatgtaattggtctcaatgaaaagccaaatgaatttgttgtcctattgtcattcactctgcctaatgggaattttttaaatgtgtctgcactctgcttaagggacagagacagacggcagctagctagggagagattcgattagcatgtgcaaatctggttttatatgctttccggggacgctatacgctatatggctgatgcctgatttgtaaatttcagtggtttcggttcatagaatatatattcaccccctgtactggttgttgattcgatttcgatttcgatttgattgcatgcacgtaatacgtcacatctacttctagttaacaaataatctacctggctgctacctgtaatagtattttgtaattaataaggacaaaacaaacccctgatcgtgttctgttctctgtgtgccatccatcgatcgaagaaacttccatcaatcatacagccatttccatatgcattgcatgatacatatacagtccaagttgcatctaaataatgatcacatgcatgcatgcaagccgagcacacacaacttatacatagcctggattattagattcgtatgcatgttcgcatgttccattcattaaccagcagccagttcatgaattaactctctacatatcgattaattaagggaatgtacaatacaaaagtgcttggtcacttggacgtacgatattgtatcaatatgaaaattgatgtttatattcatcatcacggcaaatactattagacgattataattaaactagtaaggggttgacactgatttcaatgatacaccggtaggggtacggttagattaactgaggcggtaggtacccttctcggttcttgagcaccacttttatggtacttttcagcgagggaacaagacgtttatataaaaaccagcttatttccattaagctatcataagggcactcacaatacagattttatcgtagagtctaaagttatttattatctcgaacaatatagacttgaagtctaaataagacttagagtcttattttttctaactctttcttcaataaatatgctgtcacatcagcaaaataccataaataatatgtaattaattgtcttggactctgtgattgcattgtgagtgctctaagaaacgaagtaaaaacctaccatgaatatgtcaacatttatatttatatggtaatatatatttgtcgacaaacttggtcacagtgattatttaaaaaaaaaacaaaactgaaagttcatgcatgtgtatatatttgaaaacgaatggcatggaatagaaatggacttatactattactgaacaggaaaagctcatgtgtgtataaatataggcagcgcgatcgttgagcaggtagctaaagccagagagcccgggcagaggtgtgtgcggacaggcaccgcgcgcgcttgtccgcgcggcgggagtcgagagagaagcgcgcgcgccttgccttgcaatccaatcatcattccagaaccaccaatcaagcatgatgatggcgcaaccggaaccggaagggggccagcagcagcagcagcagcggaggaacgccggcggcggcggccggggggacgaggcatggcggcggtgggcgatgctggtggcgacggtgtggatccaagctctgacggggaccaacttcgacttctcggcctactcgtcggcgctgaaatcgtcgctggggatctcccaggaggcgctcaactacctagccacggcgtcggacatgggcaaggcgctggggtggtcgtcggggctggcgctgctctacatgccgctccacgccgtgctcatgctctccgccgccatggggctcgccgcctacgccgtccagtacttgtgcctcgtcgcgtccgtcgccgtcccttaccctctggtacgtacgtcattgtcattgcttggcggcgtgtccagctactgttcgatcgttcaggcgtgcgtgcgtggttgccaggcagttcatatgccagtggtcctcgtcaattatcggcggtgtacgtcgatcgtttcgtaagtctatgagaaaatgagaaacgaataataataaattaataaaacctccaaaaaagaagataggaatagacgacgatggagacttatgataggcaatcagggacagacgagacaacaacaacgtcggccgtccatggcggatcggatcggaggcggcggcagcaatggtcaatggccggcggagcagaaaaggaggaagaagagacagggcagggatatttgtgcttgttcgtccttccgtcgtcggtcgccaagaccaagaccatgaccatgatcatgccggttcctactgtatatattagctgtctcatttgccgaatctactagtcattcagcaatatttttctcttacaacaaatcaacgaagagtacttttagccaagcgaaaaggcagaagagggtgacggacggtgacctgaacagcagcaacagcaagcacgctactccagtgtgggctgttttgtggctgggagctagtagctccatctgatatgtggcatctcctttgatttttcttggaagaacatgacagagatggtatttgaacctgtcggaacagatctccatctccttccttctttccttccttccttacgtttattatccgaaccacgccctcttctttgttttccctctcgcttttcttcttctattagttattactgcgcatgttttattacacaacacaagtttagcatcatacagtcctgtcataaactatatgtataatcataaaattctaaaaaataatgagggttttctttatatttcattctcacatagtgattattccattatatagttagattctagaattccattataaaatgcaagtgtttaggttttttttttatgtcaacgacggggaggatcacagagtgtttgccattcttatttctctatcacgttctcgtgcatttcccttacaaaatccaaacgaaaaagtggcatgacataagatggggattagacatccatcatcaaccggcggagtactatccagcaatagttaagttacttcatcaacaaccaaccaacaaaccagtacatttcatattcagtctcaggtctgaattgaatgttatctgcaactaactcaactctgctttcctcctaccagtctgcctctgctctgcttttgaccgttagatgaacaacacgcacgcgcgctcccacaaacctctcctgcttcctttttcaaacctggagaaaacacacacatagtccaaactgtatacatttctctctcttttttttttctggtaaatatcttgttcattggtaggtgtgcccaatccgaaaacccccttttcaactgtgaaacagtaaccaaatattccaactagcacaaggcatcgacatcctgggaaagcgtaaaatgttccttgcttctattaacaagcaaaccacacaaattcatttccccacagtaccagcaggacactatcttaatccaaactaaaaattcatgaaggactggtactagttcatacacacagctaggtaggttctctaagccacttccaagcaagtcaaccatcacaacaacaaacacacaccgcaaccacatcagctagataccacaacatccccaccgacatcacagacacatgcatgaggcatgccattccattctcacaagtcacagctgcatcatccacctactccacaccttcctacaatacattcaggagaaatatgtgggcatgtcacaacacataaaagaaatcacagagttttaaggtcacattgccacggtgcctttacaaaatactacagtagatgtcctatattagcataccggttttcttgacaaactgattgcaaaacgcttcactcaaacgtattcaagccaagatgtagaaacgacagaagttaaattgtcaataaagccatcacatgcaatttatatattgaacttaattatttgatcaaattctgattcatatgttgcctctgcaggtgttcttggtctgcttgatagcagggtgcagcatctgctggttcaacacagtctgctttgttctctgcatacgcagcttctctgcaaacaaccgctctctagccctctccctctcaataagcttcaacgggctcagcgctgccttctacactctctttgggaatgccctcgccccttcctcaccagctgtatacctcctcctcaatgcgatcctcccttttggtgtctctgttcttgcactcccagcgatcctcctctgccacaaaaatgacggccacctccaaagcacgcccaggcatgacaggcgtgtcttccttggtctctacatcctcgcattcatcacgggcatatatctggtggtctttggatctttcaccgcaaccagctctactgcatgggtcatcctcacaggtgccatggtcctcctcgcccttcctctcatcatccctgcctgctccagttgctcatatgtggatacagatggccctgaccctgcatcgctactaaaccatgatgatccacataagccactcctaatcagtaacaatcgtcagatggagtccaatgcgatgacgcaaaaaccaatggagcaccagatgcagggaaattgttgtggaacaatagtgggcaagggccgcctggtggcgctcagtgaagaacatagtgcaaagaagctcattcggtgtgtggacttctggctctactacacagcctacttctgtggagccactgttggcctggtatacagcaacaacttggggcagattgcacagtcattgcaccagcagtcacagctcaccatgctacttgctgtctactcatcctcctccttcttcggtcgtcttctttctgcactacctgacattcttcacaggtatctgttttgctttatatacaaacacatatctcatcacatcacatgcttcctaactaaaatttgtatacaggaaggtaccacttgctcgcacagggtggcttgctgctgcattggtccccatgccaatggcctttttccttatgtggaaccaacaagatgcaagcaccctggtagcaggaacagcactagttggcctaagctcagggttcatctttgctgcagcagtgtcagtgacctccgagctctttggaccaaatagcgttggggtgaatcacaacatcctaatcaccaatatcccattgggctcactcctctatggccagattgctgccatggtatacgatggaaatggccaaaagatgacagtaatggataaccgcactggcattgttgaaaccatgattgtgtgcatggggatgaagtgctactcaaccaccttcttcctgtgggcttgcatcacatttctagggttagcatcaagcatagctctattcatacgaacaaaaccagcttatgctgctgctgctagccggtcaagttgaagcaccttcaccaattttccagtttgcagagaaactcctttatcagttccttactgatttcaagccacagttagcttgtacaaaaattggcttagttctaggtgaaatgggctagatacaatacacaaaatgaataccacggcaagagacatcaagaagatacgaaattatcagcctatcagctggtatgtaaagtactatcagtattaccttcactaggattaatactaacaagtaggcccaaggttggatgaaggcagtttggaatgtttattactgattgactgagacgtgtgcaaaatcgtctgtatttactgttgttatgtacaccctcgaattcatatacatggtgttaaggacatcaacaaggtttacaggttgaaatttcaaccattgaaaacatgacaaaaccaagattatcagaaagtaatagcttaatagctgatgtgttaaagtacaaaaccaacacaccattcacagtcacagagcatgaatactaacaagtttgcccaagatagcataagtcagtttagtctgttgttgccagtcaaatagaattgtgtgcaaaatgctccatgtttgctgtttttagttatacttgcaggacttcagaaattggatctgactggcatttcagctttctgcctaaaatgaagtcaaataacttatctttcaatctttattaaggagatactgatacagcaaacaggggaccaatgagttcttcaaataggacaatgtgacacagaaagtttaacttttgcaagaacag

SEQ ID NO: 4835 - DNA, 4201 bp, Sorghum bicolor
aagtgacctaaaggaacatatttcaattgcagagattatatccaagttgtaacaagaataatagtttttaaatcttgcatctcatctattgattacctaatgtgcatgcttgagagggaaccagtgctagaagttgtggcacgattccaacccaaaaatttccactaactttattaactaatggctcgaagtcattccatcaacaaaggctcaccaccctcccaatgcatgcatatctccatttgcatagtacacttccttccactttcttggccactcaaaattttctttatgagaagttagtcaaatagaaacaatgtggttatagcatgatagttataaggatagagttgcatggatagaaggcttgagatcaatagctcatttgacattagtaatagttccaaagtagacatgagctggtttgtcatgatttctaatgatgttttagggtaaaataggacaactatgaatttgcaagagaaagtacaatatgataaaaaaaattaaatgcatataagagggacgaggatatttgtaagagacatggacaataatttcagcgattaatggagctcatcaaaactcaaaagaaaactaaaggctagttggtcattaaaaaattgtacaaccatgagatataaatgaaaaaaggaagagaaaaaaaaagaggattatagctttaaaccaaagaattagtcaatagctatagaagtccataccaatggatgcagaggaggcagatgggtatatatatatatatatatatatatagagagagagagagagagaggaaaattacgataaagaataaacaaaattatgtataagaacattttcaagtaaaaagcaaactgatgaaaaagataggtacccatattgtttacgtggccacttactagtttatcgtctaaagtagagatgatttacctcctcttgtctttgtcaattcgtcaaatatatataagttccagcatatagtagtacatacatataaaactttctacaaataaggaacggggacttttgctgggacttaatgtgatcttcaaaacccaaccaccttagttgcctgttcatggtgatcagtggtgcacacccctccgttgtcacacgatcagacaagaacctctacccaaaagcagaccgttactgaatagcttcatgagaaaccctgctccttcggtcgtgacaacaacaccataccagccaaagttgtggccactggacaaccctctcattttcttcatcttttttgtctttccccctatcttcacatgcaccttaattaactattccacatttcctatatgtcaaacgcatgaatttattgttttgttcaggcgatgtctggtccatccgttgttcttcaagatccgtgtgctttgagtacgttgaatgcttcagtacgaaaacatgtgcagattcattggatgctacacctgcctgaaactaaccatatttcaggcacttgaaatatagcaggtccctaactattcggctctgagaccatgcaaataacatctcacgcatcaacatgaaggatcaccaaataatgcaaatgcaattttcactccaaccatatgcatacatctcttttccccgccatactcatacatatatgcttcctccgtggctccgtctccaaaagaagtgtcacatctcatttttcgatgagacaatcaatctgaagtttaactatgggagtgaaaaaaatagtatcaccacttggttttaaatatatttactaaaaacatatattgcatgattaatttaattatatttatttagcatcatatatattagtataaattgtatatgtttggttaatctggcattagttgtgacttttaaaaaagtgaaatgtgggacaggcgagtatgtatgtatatatattatatcgtctcactttgtgatgtaccacatcacattatactgatcgacaaatgctacgtgcagctggcctgtttgctcctgccgcctccccgccatcgtcagctatggcgccggccaacaatgtttcaaatggtggcagcgaagaagaagcgaggtacccgctgaacgccgagtcgtaccgcctgctgtgcaagatcgggagcggcgtgagcgcggtggtgtacaaggccgtgtgcctgcctctgggctcctcgtcgtcgtcgtcggcggtggtggccatcaaggcgatcgacctggagcggtcgcgcgtcgacctcgacggcgtgcggcgggaggcgaaggccatggcgctgctgtcccaccgcaacgtgctccgcgcgcactgctccttcaccgtggggagccacctgtgggtggtgatgcccttcatgggcgccggctcgctgcactccatcctgcgccacggctttcccggcggcctgccggagccgtgcgtcgccgtcgtgctcgccgagacgctccgcgcgctgtgctacctccacgggcagggccgcatccaccgcgacatcaaggcgggcaacatcctggtggactcggacggcgccgtcaagctcgccgacttcggcgtctcggcgtccatctacgagaccatgcacgcgtcggcgtcggcgtcggcggcgacggcggcgctggggctcggctcgtcggcgtcctgctgcttcaacgacgtggcggggacgccgtactggatggcgcccgaggtgatccactcccacgtcggctacggcatcaaggccgacatctggtcgttcggcatcacggcgctggagctcgcgcacggccggccgccgctgtcgcacctgccgccgtccaagtcgatgctgatgaggatcaccagccgcgtccgcctcgaggacgaggagagcgccgccgcgagcagcagcagcaacaagttctccagggcgttcaaggacatggtgtccgcctgcctctgccaggagccggccaagcggccgtcggcggagaagctgctccgccacccgttcttcaaggcctgcagccgtcgctccaaggacttcctcgtccgcaacgtcctcgccgccgtcccgagcatcgaggagcggtgcagcaaggacgacgacgcggggaatgatctctgcgggtgtgtcgtcggcgccaggggcggcggcgcacgctgcgtgtcgccgtgccgtcgccacgccgccgacgacgacgtcgtcggcgtcaagaaccgacggatcagcggatggaacttcaacgaggacaacctggagcttgatccgacgacgaccgaggagccggcggcggagaagaggtgcgtcccgttcgagaacccggtagtagaactggacgacagtgactccaccggagatggagatcgacgacgacggccgtcgcatggggatgaagatcaggatcacgggaaggcggcagaggtggtagggtttaaggagcagcaggaagtggtgacacggaagctgatggccgtcctgcagagcctggagatgcaaagggacatggtgacgaacgtgttggaacgcaccgccggtagcttcgacggcggcggcaatggcggcgcctgtggtgagagcgtgacaggtccaaggcaggaggagagggaagagatgctgcttgggtacgtccggcagctggagcacagggtgggagacctgaggatggaggtcgaggaggagatggcatggaacgcccggctggagaagatgatgctgcaagagaaggagataaactcatctcaggcgtcggctgggaacagttttagttgatgctgttccggttccgcttgttcatcaaggccaagttcgtgtattttacagtatcactgcatccattctaaatggtaaaaacaactctagatatatagtttttaacctctcctatatttcaggtgtctgaattttaagatgacttcatgtaacactcttgtaccatcaattagtcgtagtgcaagtaaactattacttttatattttgttatttgtcttttggtatcataacatattaaatatttttcctctcgtcttcctataaaaataattaaaaaaattaattatctttatgtcaacacaaaacaaatttttttgtgtttgtggttttatctaacagctctttattcttaatatcgaaaattgcagattgcgcctacagaaattataatgaacaaaatctacaattttaatataaaatatatgaaataattgttgcctaaaaggaaaataaatttaaggacctgaacctatagtttttttactatacatctagttac

SEQ ID NO: 4836 - DNA, 14464 bp, Sorghum bicolor
atggataataagaccctgtttagttccccaccaaaaatttttccatccatctatcccatcgaatctttggacacatgaatgaaacattaaatgtatataaaaaaaaataaactaattacacagttaggttgaaaatcgcgagacgaatcttttaagcctaattactccatgattagccttaagtgctacagtaagtcgcatgtgctaatgacagattaattatgcttaatagatttgtcttgcagtttcctgacgagctatgtaatttatttttttattagtttctaaaaacctctcccgacatccttccgacatatccgatttgacacccaaaaaattttttttatctccaatctaaacagggcctaatgtagccaactctctttgtacctgattcggttaatgctgatccctccccgccctcgggttgagggaccagaaccagaaccagaaccatggctcctccgaacggcgccggatcacgtcgacgctggctgcccgcccgccgttggtccagaaacactctcgggtacagccgtccagcgaagccaccagtcacgtgcggtgcgggcactctccgctccgctgcagcagcccagcctccccccggccacgggaagggagtggaccccaccgcgcagcgtcacgagaggtggggtgggaccatgacgccgtaattgcgtaggcgtaacgacgaatccggctctccactccgaaccaccgcatccgtcctcgtctctgcgtgctctgctccggtcgccttccgtcgcctactcccctcccactctccgtcacgtccaccgacctcccagtcccaccgagagagggacgcctcgccaccgccgtcgctgttgctctgctcccctcccctcccctcccctcgcaatggcgccgacatccccgcgctgagccggacctccgattcggcgctaccgtcccgcaggtgagctctcgtctccttccttccttgctcgctgcttccgctcggcccggggtgtgtgttcctgctcccaaccaatccccgtgaaatgcccgccggggttccatgccgatttaggcgcttccagcttgctcatctgctttcccgagtatctacgctcatcaatcgcgagttatccttccttcgattccgggcctcctcctcctcctcctcctcctcctcgggtgcgcactgcgctcccgcgtgcattcccatttccagcggctgtttggcgtgcgctcgccgctagtgggctgcagggggcccgccattcccgttccgaattcgcaagcggcggcgacgtgcgtgcgtgcgtgcggccgagccggcccagcagaccagccgcgttggctggcgggacggagcagccccacgcccacgcccacgaccaagccgaggcccagcggcgccgtcccgacggtctactgaccggcggctcagatccacacggcgcacggcgaggactcctcactctgattctctccctcagatccggccaaattggaacccgtaccaacgtccaacgggtaagaggaaggagacgacaaaccttcattccaatggttggttgctcctggccgtgctgtgaagggcttactagtgaattagggtgatggcgtcgctttttgctgaacataaggcagccgctttttgctgaacataaggcagcgtcgatgccgctaaaattagggtgttgctaaatgcatagtgaccataggttgtgtttgctgtttcaagctcgctacggttgctttatttaattttaaaccgcttcatttatctattaggctactagtgaccatattttgatggtaactgatgtcatgcctgtaattttaaaatgtgaatttattgcctgttttgttcaccaggccatgaagtgggctgatgtaggttgactatgtcgttcgttccaatttaacttaagcgtgtattggcagtgtatgcttttcctcaacttatgtgtccgtacttgccgtgcagttgaagacgaggcagctgttctctacttaaggaagagatggcccatgtttcgttcaaaagcaaagatgtggatggcggcatgtcccgatggtccgagtatctaagtgttgaagagccaattccttcggcattggcaacctggaggaacatgggtgttgatgggccgcaaggctcttctgccggtagccacaaacatcttcagatggagccggtggttcagctgtcaaaggttgcggcaggcttgcttgccaaaatgtaccgactgaacagcatcctggactatccagatccaaacacacacacattctcagattcattttggaaagctggtgtctttccgaatttcccaaaaatttgcatcacactgtcaaaaaagttccctgagcatccaaacaaactgcagctggaaagggtaagtattcggttttctttagctgttcgcaactcttctggctcccatcctagttcatttagtttaatatggtggtgactggtgagtcaatcactctgatgctttgcaggtagataagtttgctcttgatgctttaaacgagaatgctgaaggttacatgcacaatcttgagcagtggatcctggtatgtgctaaccatataaagaaatgagaaatctgaacctttagggcaaaccccccctctttctgttaatgaaaaacttgttgcaatccaaaacaatatgtgtatggtaccacccaagtctgtccaaattgtgtacaatggttgcatcaattaacctatgagttttactatattctgctctcagtaaccgagcatctttgttgaactgatatgacatagaaccgcacctgctctatttctgtgtgacttattgcactggctcattttccatttgccatttcacctgatacattttccaaacttgggttcatcagatatggtatctgtgaaggctgcacatgctagcatggtcagccttttttttcggtagcataactttgctggccttaattctgcacgagtatcaagcttactatatgaaccagaaaaaaagctgtacttgcaatttccaaaaggccgtagccggagtgatgcactaccctgaactaaccgttgtctttctatgctgtaaaagtgtacttagaaattactgagttattagtttagttaattaccttcattcccattgatgatgtttttctttctcctcattttactgatttccttccaaattccatcccatcagttgcttcttgatttgctggcatttcgtgaacaagcgttgcgacttattttggatttgagcagcacagtcataacattgctggtaagagatctcttggtcttgattgaaatgacctgtcgttgttgtctgcgtaattgattatgtttgcattattttcacagccacaccagaacactttaattcttcatgcttttatggatctgttttgttcatttgtccgagtgaatcttttctctgataaggtaactatgttcttaatttcattatatttgaattatattactactccaaatagtagtttttcctcttttaccaaaatgatgtcctacctgaacttctgtttgcagatgccaagaaagatgatcctccaggtttacaacatcttgcacgtaatgctaaagggtggtcgtgattgtgagttttatcaccggtatggcgttacctttggaaaataaaaattgcttccaccttttgaaaccctttttaatactatgattatattgctcatcgtaatttttcatttctatatgccagttgctggtgtgttataaaattgcatgaaaacaaatatagatcattctttattagttaatcatgttagttaatattattcttgattattgctaaaatgaaaatacaaatatgcgcgcagtgcaaaacataaattgtttagtttgaaaacgtttaagttacatgtgtagaattgtcttggaaaacacctgcagcatctcataaatctgaaggattttaaggattaatctagaagaaattagtggtcaaaggtgtgcatcgaagggcatgcaaaatcaaatatcaagttttgacaggagggactatttaactgcatccctgtgatatttgttttgtgtcatgaatgatttattgttaccttatcaattatattttgttatatccagtctactctatagattcttcttcactgactattgcttatctatacacagattggttcaatttgtggactcttatgatccacctatcaaggggttgcatgaagatcttaattttgtgagcccaagaattggagaggtggtactcatgtcattcttcattgcagtagtaataactacttaactaggaatcaagcttcatatgctatttgagtgttcaaatcctaaatgtgttacatgctaggctacttcctcccatcatttagtactatgatcatgttttgcatacttgcattagcattgagtctatttggagggctaattatttttcttacagtctgttgcttgaatagttttgtgatttttttcccatttgttttacttgtcattcttattgccaagcttttttttccttctgtatccgatgctttatctctgctgttatatttattactaatataaaagatgggattctgagtatgttctatggattttgtgagcacttgatgtggcattgcgaatcttctgtagtggagattgtctacacatctttattcacagagtgtatgatattaagatcaatgctttgtgctatgagtttataatttaaatacaatgtagataagcagttaaacacttttgaaaagcacatctgcgcatgcatcttgttagtacctttacagcatctgacttagattttctatctaaattgttttttggtgttttgactgtaatgttttgttcctcaggtcctggaagctgttggcccaattatctttctttcaactgatacaaaaaagttaaggaacgaaggtttcctcagtccatttcatccacgttatccagacatcctaacaaactccgcccatccaatggttagtactttcaccgttagagatgataaatcatgagagcataaatgtctgttcattattctgccacaccatgatgaagatgcattataatttagagatttaacgtgattctgtttccttccagagggcccaagacttggctaatgttacatcataccgtgagtgggttcttctaggatatcttgtttgtcctgatgaactacttagggtgaccagcatagatgttgccatggtatgtcctatgtctttttttgttcatactcttttcctgaatggttaataatttaaggtgtatataatggttttaatgaacactttacacttacatccaccaacatattggcacatacatcttgttttcttactccattttatcataagaagtcttattggtatttggtaagtctccatttggtgctatggtggctttctaaaagcatttatttatttctaattttagatggatttggttataagtatctttcatgtatcagttacaaggaactgtactagaattagtaaagattcaccaaactagattcctcagtgcaaccagcatgtcatttgtgatttagccttgatttgtttcttcttggtcactttcaggttgttctgaaagaaaacttaatacttcctctgttcagagatgaggtaaaattaaagacaatgtggtggtagcatgattaattctttggtgtcactattctaatttggtctttcattgtgtagtacatcttacttcatgaaaattatcaactttatgttcttccaaaagttctagaatcaaagagaatggctaaatctggccgaactaagcaaaaggaagctgatttggagtacaatgttgcaaagcaggttgagagaatgttaacgtatgtcctgcacagccttttcatctatacttttccctatgcttcaaaatagcttgtaatgtgaaggcttctgttgttccacaagtttgggctatttaccttatactttgattattgtttttgaagcctttctgcatattcacttttttttgatttgccactagttcaggtagcctgttcttggttggttcttttgacttttaacttcataactcggaactattttacctatcaattttcccttatggtgtcattacttttttattggactttttgattttatctactcggcatcattcttcagatgtttgttaatgttttgtgttaactctctacagggaagtgcatgagcaagcactagtctcatgtgatgctatgcatcgtgaaaggagaattcttcttaagcaggaaattggaaggatggttttatttttcacagatcaacctagcctcctagcacctaatattcaggttcagtgccaagtatcacatttcgttaactactgatctattaccttttctttattgttgtaaatgagacttcaaagttgatacactagattctggcatttgatattttatgttatgtccaatattagtctctttgatgcttgagcttctgatgaacgcaaaatgtttgtaatttataatgtaacaaaaaacttaatgataaaggacagtgttattaaggcactgcttaagtgccaaagtgctgcaagcatgacgcccacagcagatgactcgccttagatttgtatccgccttacagccaaggcgcccaaaaaacgtcgctttggcatccgaattgtgccaaattgctcgtggcaagcactatacgggtggggtggggtggggggggggagcaggaaaagtcaagagactgcgggagagcgagagcgggcacatgggagattctgctcagtgctcaccagtgagctggagaggaacaggaggcagcgccctcttccccctcaagcatggcagcagctgtcgatctgagagcgctgagcagtgagggaggggaagcagcggggcggaggtaagcagagcagcgcatctgggaagaggcggagcggcagggagggagggacatgggcgtaaggcagtagtcagtcaccacgcctcaccttaccgccttgataaccatgataaaagatgtaccctaccatacatttctaccagttattctggggtgttggacatattagacttcttttttttcgtttacacttgtaaacaattcaacttttatgtaaggcaacttatctgtatataatctcttttttgggggaaaacagtagtatatcatgctatatatttgtattgttaatagtcaaaatagagggtaattcacaagaaagagaaaataaaagaagtgattaatttggatttacaagctgctgatggatttccagagaatacttctctgtgcactaaggataaccttggtagattccatgagacttgagtaggttctatgtactttcaaagatcttcatgatttcatatcgagggaagcacctaaggtcatgttattctacaattgatgtacatataatgtcgatacattgtgcagatggtcttttctgctcttgctttgtctcaatgcgaggtgatttggtacttccaacatgtgggggttgcagcatcaaaatctactcgagtgaaaactgttgacattgtgagttactctgatgttatttttttccttggattcaataaatcgttgttccagtattctattgatttctaaaaggagaggtttcttcttatctcaaaaaataaaataaaaaaataaatcgttgttacctttccatactaattgttgactgaactttcaggatgcgacagacccaactattggtttcttactagatggaataggcaaactttgttgcctggttcgtaaatacatagcaggttcttccaaacctattgccttatttgaatgtttcttttaatatgtttccttgtctagtcctagctgtgccttatagggtagtcattgtgagtaaaataccttattatgatttatgatgttgaggtcagaacaagtgaacaaatttgtagctggcatgcccattcttgatagtccattctgggctagttaatgtttgcttagttcatgttgcaagcactgtcttcttagaatatagtgtattagattcaactggtaggattatattcattaatatgagttaagtaaaattttcatttatgccttaagaagattattatttctcagtgctgaatttgtatactgatgcacatctcttatttttaggcaaataaaatattatacaaacaaaaaaaaacgtaagtttgtcctaaagtagcactgtagcagtgtcggaaaatttccatttttatcaaatgataccttttcctctttgcagcaataaaaggttatgcattatcatatttgtcatccagtgctggaagaatacggttcttacttggtactccaggaatggttgctcttgacctagatgcgacactgaagggcctttttcagcaagtcctccattgtctggagaacattccaaaacctcagggggaaagtgttcctgccattactgctgacttgactgtaagttaacaacctaatatcattacagatttactcaatgacctatgaagatagacctaattttcctacaacttctgcattctcgttggtaatacgattttctatgcccattaatgggtagattgatgcaaagattttcttgttgatccacacaacagtatacaattccagttcaaaattgttatgcataatttccagcactcaagctttccctctcaaaactgtttcatttgagcagtagcacatgttttaagtctacatgtagattactacagttttaatatttatcaagattctagattgtaaggtagttttgaatacttttcaatgatgctgttgagaaataaacttctagatattgaggataatatatttgctttaccaccagagctattttttgttgataaaaagtgctcactttgcttctcctcgaactcattatctatgaattgtgctttattgaacgtcacctcacctcttttctatgtgttgacaattttatgatttttaatcatgctgaaggttgttaatgtaaacaccatattctagtgcttgttggaacctgaaagcttcacaccttggttttggttttcttttacattgccgattgcattagccagtgaaaagtatgtcaccaactgtgtatctaattctatatgcttaggcttccatttaattttaccctttgaacttttcaaacttgatattgatgctgcaggatttgcgtaagcactggctctccattttgatgatagtcacatcttcacgatcctcgataaacatcaagcacttggagaaggctactgtgtctactgggaaggagggtttggtgtcagaaggcaatgctgcatataattggtcaaggtgattggaaagatctgttttaatgtgttagctagattttttaactttttttttgccagccagagtcatgatttggaaaaatgctatcctatttgtaaatggcttgtggtctcaggcccaagcatgggatggtagttccccattatgcgtctttgctgtggttagtgtggtattgtgttaactcctccagcttctgtatggtgcttagcataattggcccaacataaataaataatcctacgtcatgctcctaaaattacaccttgttttataccatcttcatgccgtttaactgcatatctatccctatattttacactactacaaatatagttggtaaagtagtagttgtttgtcgtgcatccatctgcatagttcttgttctctgttattgtgtttttggcaagaactcaaatacttgaatttgtatcaaaattctttaagaatcatttgaatctcactaacatgttctgcagatgtgtggatgaacttgagctccaactctccaaacatggaagccttaaaaaactctacttttatcatcagcatcttaccacagtaagtttatgttttgtttatattgctgtgtgattcgcatggtcctttaaaccttttctatgtaactagaattttatgctgataataagtccttttttttttgctgggacctacaggtcttcagaaatacaatgtttggcccagaaggtcgtccacaacattgttgtgcttggcttggaacagcttgcagttttccagaatgtgcttctgcaattattcctgaagaggtgtatatttgaattcactatatggttccagtttgagcattattttgatgtttacagcatcctgaagatgtgctttgcaacatggctagctttgaggattagtaaaatattatatggcgacacatatgctattagtttttgcttggcaagatggacatttgctatgcttgatctgttgagcaagaagcaaactctgcctatgccttgggatgtgaatgctttgaactgccattgacataataatcctatatgctccaactcttaggccttgtttagatgtgaaaactttttggatttcgctactgtagcactttcgtttgtttatggcaaatattgtctaatcatagactaattagggtcaaaagattcgtctcgcaatttacaggcaaactgtgtaattagttttcgttttcgtctatatttaatgcttcatgcatgtgccgcaagatttgatgtgacggggaatcttgaaaactttttggtttttggggtgaactaaagacataacaatatgtccccaatctgttactgtgactcctctacaaggctgcatttctcctctgtgtttgccatattaattagtgaatctttctttgtttgaaatgtaggttaacaaaattggcagagattctatctcttatgtggagtctcttattgagtctatcatgggtggattggaaggtttgataaatattctagattcagaaggtggatttggctcattagagatgcaggtagataatttctgagtttatatctatgatttttggcttatagattatatcttttaagtctcacttctaaaatcttgccagctttccccagagcaagcagctcttcgcttaaataacacaacaagagcaaaaggtgtttcaagcttgttaactccaggacatgagagctatcctgataatagttcatcaattaagatgtcagtcaatttgttacttcacatcactgtttcaatgttgtcatcattctattgacttcagtataattatttatgcctcaaaaacaggctggaagctgctatgcaaaggctgacaagtttgtgttctgttctaaatgacatggagcccatttgtgttctcaaccatgtttttgttctacgtgaggtatgtacaatttatgttcactgggaggaagtaaatttgcatgtgtggggaaccttaccacatgttaggtttttaggataacataataatatgccataataagatgattggtggttcatggctattaagctggtcgataatatccttatttttcatgttaaagtaataatcttatgacagaaggggtctaaaaagaatgatgcagggaattttgtatttgcaaaaggaaattactacttatgttgtttattccttaaactggcatgcatatccttgtttgacttgcacttttttagataaaggaagcttttattgaaatcaagacaattacattgatttgtttgacttacctagattctgttaatttcacagtacatgagagactgcatcgtaggaaatttcaggagaagatttcatagtatgattagaactgagaactgcattcagcgaccatcagtcatagaatctcttctaagaagacatctgggcatcgtccatctagcagagcagcatattagtatggaccttactgaaggcatacgtgaagtgctgctagcagagagttatactggcccatttcccaatctgcaaatgtttgagactccagtggggacacaaggagggggatctgctgttgagatgatatgcaattggtatattgagaatgtagtaaaggatgcttctcgcattggagttgcttttgatgcaatccaaaattgcttcaggagctcacaacctattggtggtggatgtttagctgaagcatttacagataaaagagaacttaaatcacttgttcgtctttttggtggctatggaatagataaaatggataagatgctaagggagcatacatctgcgcttttaaattgtattgattcagcattgaggtcaaatcgtgatgccttagagggcctagctggaagtgtaaattctggcgataggattgaaagggatgcgaatctgaagcaaattattgatcttgaaacattggctgatctctgtattcaagcagggcaggcaataactttccgccggctgttggttgagtctgttggagcagttcttgaagagaaagtacctctcatatattctctgctcaaaggattagccttgcagttgccagacgaggtacctgataaaaatgagataattagattgagaaaggttgcaagcagtgttggtgttggtgacaaacatgatgctgagtgggtacactcaattctggcagaagctggtgcagctaatgataattcttggatcctacttccatacctttgtgctgcatttatggtgtccaacatttggaatggtgctgtttatgatgtcaatataggtggattcaataacaatttgcactgcctagcaaggtaaggacttgtttcctataataatgtttgatgtcaacatttgttagtcaccggtatccatgatagacaaagcctcttaccttcgattgtagctattctcatgagactagtctctcactattatattctcattctatattatggactttttttttgaaagtttctattacacatagttgatggataaaaaggatactattgggaataaggtacacgtgataaaatcgactctcacctcttgtattttcaggtgtgtaagtgctatagttgggggaagcgaatacaccagggtcgaaagggagcagcgaataaattctctttcaaatggacatacagatgagctccaagaggctgagttaccaagccgtgtctcagcagaagcaaatattaaatcttctatgcagatctacgtcaaattgtctgcagggatcgtcctggattcatggaatgacactagcaggtactggattgacctggttcatacagcatttttggattttggttggcaaaggttttatagttcttttactggcttttacatgacgctaaacgcaggccacacatcgttccaaaactgatattcctggatcaactctgcgagctgtccccctacctcccaaggagcaccttagaagttcacataccatacaccatcctgcgctcaatataccaccagctatatggagcttcactgatgtcctcagaaccgatggagcaatccccaaggcagtcacctctgatctctcttgcgcacgcgtccccatccgcaagacaacatcgaccggagacaactcccaggtcgcacaccttcgagccaagctactatagctcgtcggggtcccagcacgatgatggctacgatgtggacaagaggaccggacagctgcggagcatgaggcgctccggaccgctcgacttcagtacgggcaggaaggtgaagttcgtcgagggctcaagctccgggagcagccatggtgctggctcgctgcagagattcgcagtgtcaagatctggccctctatcatacaaataggaccgtgaccttgcattgcaagggacgtgagcaccagcattagactgctgacaatacaggcgcaagtgtgtatacaacaattgggtgtaactctagagcactagatctgcctaatgcgtgtttgactgttggttgttgtacgtagctagtagctagttttgctgtaagtagaacccattttgtgttgatagtttgctagtatagtgtgcttgtgtcgattgtcattagataagtgattgaattagctgttgctagtttggtttgtgtgcctatgatacagttattcgttgatttgcttgatagcaaagtaagtaaaccatctctgtgctgtgtatgtgttactgaaatatagatgtcatcttctgaagctggcgcacaatcctaagcagtcttgtccaaaaaaaataaaaataaaaaaatccatgggttgagcccaacttgatttcagcaacacagttggaattgtctctctttgctcacaaaaaaaagggggaattgtctgtctctttcgtgagctcaaaacctggtttgcacaatttgagctccaaactagtcataggagaaaatcccagtttggatgtaatgtaagagatctttttaataaactgttaatgtatgaagtgacagtggcagctagtacaagaactgctgtgttgttgcatttgtttatataccattatatgtattgtcaagctctatgtcgtaaatatttctgttcccaatttctctgctctgtgaattgtcagtaagaatcaacaaatagccaaggtgatacatcaatgttaccaatgaaaaaaaggtgaatccccataaccaagcaccctaaaatcactacatttcatttctcagggtaaaataaggactg

SEQ ID NO: 4837 - DNA, 5701 bp, Sorghum bicolor
gtacttgtggaaggtctatctcctattcctttaaatcatcacatggagccatctcttaggctcgtgtcctgtataccagagcatagattgacttgtctgaatttgttacatcaattgtatgctgatatgctaaacctgtaagagtagactaaatggcccccgaacttgtaaagttgtcatatagctgatcgattgcaccacttgtttcctgtcgtagctgtcaatttgattcatttatatgtcatgggagcttttcttttgactttatatgatatgagggagctattaatttgagtacttttaatgccaaaatcaatggttacttttaatttatttctcttattcaaagctacactattaatattatgcctatatagttagtgacttagttacactgaaggttttgtacttctcttcacctcaggttgagagtttatatcctagcgaattaggacctgatgcagtgtccacaaaggacttccttgagagtggtttagtgcaacttgacaagagcatggaagaaagagtcaaagcagcagcatcgagaggaaacgttcttcgctacgtagctgagattgaaagcacagggtatgcatccagcctttgccctggtgtgatagtactgtgcgatatccattagcataaaaattcaatctgtttcctgaagctgcaacatggtttattcatattttgtcattgttatctttcaaaaaacaattgttgttattgttccaaaatcttgttatctgccacttgtttacttgtttggaacttctttctggtgcttgttttttgcatggtgctggctggttttcaatctttctgttgtctaacaccccagtttgcaggtgccaagtaggccttaaagagctcccaaaggattctgcactgggtagattgaggggaagtgacaatgtggtaatgcatccttctctcttatttttctctcccttcgtttggtcatccttgtatgtcaccacagactgttcatttgatcaggtggagatatacagcagatgttaccagagctcccctctggtgatccagggcgcaggagctggcaatgacaccactgccgccggcgtccttgctgatataattgacctccaagacctgttccagacaacggcatgatcgtagatcggcatccaacaccatcttgattcttgcaaggcaccagggctttttggtactctgatcggtggtgctactgtgtgtccgtcaggcagggactcagcgtgcgcttttgcttgttcacttcagtcgtgtactcctgtgtgcatttggttccttcagccgctccactgagacgcgtctgacattagaataggatttgaattttgagcagccatgtgggggctctttacagttcacatagaggaaaactttgtttcagtgaaataatgtcgcgggtctctacattaagcagtcagactgatgttgctgctagatgatagtgaaagagtaaacttttgatttcgagcaattctgattgtggatgatgtatcggaaactctgcactttgccgtgcacgctggcacaagtatgtaggtagcctgaaatcgtggccagtttgtcaaaaaattttcttggttgtgccattgtacgcgattccacggatttaagatgttattcttttgagtttatcagtcgaatctgttagtcattcagcagtatttttttcttacaacaaatcagtcaagagtattttctgtcatagcttattagccatacgaagccgcttttgccgttgctactgctgccacgcacaggtgcagtgcagggaaagccctggcaggtggggccgtatggtggttggtgggccccacctctctcgagcacgttatcgttacccgtccccgcgggccgcggagcgagatgagatgaaatttgaaattgggaggaagcctagccgaccgaccaccacgacaaatcctcctcgttgctcctgctcgtcttgtcggcaggccgccaatcaacccgatcgatccaatccgccgatggccgccgccgccaccgaggatgcgaaggagaaggagctcctgtcgtcggtggtgggcgacatccggagctactccggctccgaccctctccgcccgtggctccggtacggcacccgcacccaccgcttttgcttccttctgcctgttctctgctgcctccacgcatcgcttccttcgccccaccgaccggctgatccgcccgcctgcccgctgtctgctagggggttgcggaagatggagcgggcgctgctgccggcgacgctgcgggagaagctgcccaggttcctccagaagtgcgcccaggagttccaggatgacgcccgctaccgcgacgacccgcggtacctccgcgtctggatccagctggtcagccatccttaatcttcctttgttgctgcttacttcttctgcttcactggggatcgatcgagagatgacgacggttgataacttcgatcggttgggggatttgtgggttttaggagcgaactccggaatctgcacctgtcctactgtagagtgtagatctgatgtatatgtattgacatcaagatactactttttgttagctactagtcgtaccgtagagtgtagatctcatcatatcttagcggctagcgtgaatgttgtcctcgactaaaacagtgcctcactggaaatatgtagtgtaaacagtgctaaggtggttcttgaggaaatgactaaaccatattcagcttgattactctttggagcccttgttattgttataataaatgatcttattagatttctaaatcctgtagatggactacgtgacggatgcaaagccattgctcaagaagatggagaggaacggaataggcctcaaaagagcctcattctatatggcttatgcactatattatgagaagcacaagaggttcaatgatgcagagaagatgtactgtttgggaatccagaagtaagctaagctcttaataccccgactcccaacccacccacttctttactttttttttaactgggaaccacacatctgccactagaacggttactgccaacctgaacaactctgttaaaaacagtagtgcacggttatgcaatactgaacaatttagtcgattatataagaagggttgcaagtaagacttcatgtaaatagatctcagtttgtagttcctttgagaggaaagctggtttcttactgaaatgtttaatagccttgcagagcctattggggagttgcacagagcacatgaacagtttggttttcgcatggaatcatacaagaggaaaaataaagtataactctcatttcatttgttacttcagtttagatcatggccaatgttgggtttgttgacatccattactttattcatgtgctttaactgcaggaaagaatgcccaggaaacctgggtctagcgctgcatctatgaaccaagtcaaaggtaggcttgtgtagacagggttacacatatcagttcttattgtaaccaatgttgcctttgacatttatatctctattaaaatcttattgatcaatctttccccgcaaaaaaaaagaagcattcttttcttgtcaatccatagctagaactttcctttgcaaactcattttctgattagttgacacaaaactataatggggatttctttctcaaaatatagaagcatgcttattcttgcagatccgcaccttgaactttctttttcaaagcacattttctcattttattgacacacaattataatgggtaattttcccagtggcaccttactgacttttgtaacatgttgcaggtgaaagcagaaactctaaagaacagaaatccaatacaaagcaaacgtcaggaagtagttctaatccttcattaggctcttatcctccattagggccagctaaagttggtatgctctccagaggaaactcaggagcaaacaagaatctgtcccgttgtaatagtgatgatactgtagttgtacggtttataggctctgctttggttgggaaatcagagactgaagatgcctgtcaccatggcctagttgaaccaactacaaacactaaggaggctttggatgccatcaatggcatgtttatggagccactggaacctgaaactattctcaagaggcgatcaaagcgtgagaacccaaattataatcagcaaggaagtgcatttgatatctttgttgatggcgatgaacctagtggcaatgatacaaatatgctccagaacaacagtgtgaagcaagaccatacaaaattaagtcagcaaacaattggatttgagatctatgttgatgaggatggtcctaatggcaacgaccaaaatggaacacaaaacaggaactctagaaaggaaaacatgaagttaaatcaggaaccaagtgtgtttgagatttttgttgacgaggatggccctaatgacaacaaccaaaacgcagggcgaaacaggaactgtgggaaggaaaacatgaaggtaaatcaggacagcagtgggtttgaaatctttgttgatgaaaatgaggctaatggcactgtccggaatgctatgtgctacaagagtaataggtatcctccaagaccattatctgagtcatctaagcatcaaggcgaaagtgacttccagaagccatttgttggagggtttgcaatattgccaaatgatgaagaacaatgcgaggaaagttatggcggtgctaacataatttccagaactgtgcagcctactcatgacactagtactttgctctgtccagttcaaggtaattcaggaacaaggaatcgtgaaggtcctcatcctttgacttctgggattcgagaagacactgtcattcgtaggtttgttgggtccactattgatgatgagcccaaggtggaaaatgcatgccaccatgggttagttgatccaactgtcaatctaaaggaagcaatggatgatataaacaacatgtttggaaaaccactgaacttcaagggtgaaagaataaagagcaaaactaatgcacagtcagatggaaaagtagcttcagtttccggtttctccatattagctgatgatgacctaaaagagaactccaccagcaaatccagtcagagcaattcctgcaaatttgggtatgagaatggtctatttgaacccacaatcaccactcgtgatgtcatggcagagatcaacgatatgtttggaatgccactagacttgtaagatgcatgcttagagtggactgaataactcaactgctagttggacaactgctttcacctttcaactctccccctgaaagtcttgctgatgtgaagagcatggaatcaattcccttatttcgtgcatagatggtgagcattttcttaaattgtggtcaagtgtttattgttcacactgatcaatcttgaatatgtggtatgtgtctaattttgccattaaattgtctaaaacataactataaaattgctgcttttttttgctagttatatttctttaacaattactctgaaaatattatgtggtttggtaattgttggtgtgaaaccttacagctgcactgcttttcctggcacaggtggagatcacaacacaatgttaggattctcaggttattcagccgcagagaaccgcccaatgtaccacttcttgtggagttgccacttgccactaatataatttatcttctcaagtgaaggttagagagcgtaatttgttacacg

SEQ ID NO: 4838 - DNA, 7703 bp, Sorghum bicolor
gcaatgcatttgcaccaaggtacctggtaacaatagaattctttgattcgtgtcaatttaagctccagaaagaaactcatgataccttgccatttaaatctaagactggacccttttttgaggaccctccaactttcaattccacagagaaaaatagtacgaaagcaaccaattttttctgttttcttgctctattctgaaatgatatatttggcaaaatggtcacagagagcatttgtgtcaacctacatttggttactgcaggtattcacaaattctgataaagctcatgtggaggaagctctgcacagactttgtttatagggtttactgtgttcacaaattactaggacatggttgtgagtagtcctttctcttctctatgtgcaagatggtaacagtaaaagagctaggacttcaacatagcactatggacaatgcaaggtaaatttagatccccttacaatattcaattattaagtcattgctaacatggagagcagtagagctttctcatcctctgttctttgtttgacgtcactttaggagctccttttctgcctctgacagatgtagtgcctagccatttgctatcaaaatcattgaatgctacatcaccaaattatatttttctaggtgccaagatttatggtttttaaaaatttaggccaagaataatttatgttttcaggggtagagatgactgaaaaaatgtatggaaatttgtctttgatttggaggtggggtgggggtgggggcatactttatcatccggtgaaacaagaatgatatttgaatggcccatgatgtgtaaatgtcaatgctcttgatcgatgtgaagtgactgcatgttctttttaattccttttattgttttgccagctgaccaaaatcaagcaattaccatgatatcatatatgcatcgtcagcagagacagcacaggtaagaaggaaaattgtgtaccttcagtgctccaatagataggagattgtcaacaacaagacaattggggaaggttcagacaacgttttgcttgtgggaatggagggtgttgcaccaagttctgtcagcattgatgttctatatgtggtgaggatgttaacacttgcatcaagatttctgttagttaggccaatgaatacgaaggtttttgctgtttgtttgcagaaagttgaagatccacttcacttttataatcaagatatgctaacgaacacattttcttatttaatcaattgttatttttgcatgtgaagatttctgttatttaggccaatgaatacgaaggtttttgctgtttgtttgcagaaagttgaagatccacttcacttttataatcaaggtatgctaacgaacacatttttttatttaatcaattgttatttttgcatgtgaacttgcctctgcagatatgcgcaacctcatatgatctatcttgcaaattgagtgcagttttagattccagagagctcactaggtcagtatcatttctatttcactagaaaacattacacttgtgactatcaggtgatggcttggggggaaaggtcatgcttggatacgcagagagtggcaagcttattgccttttgcaaaacaaaaaacagtttttaggagtggcaagcttattgctttttgcacacaaaaaacagttttcagtgaatgaaggattgttcctaaccatcttgcactgaactttctcaacctgcctattctcggttggcattagagaaggaatagggttccaccattcttgtactgcagttaatttgacccaacttaaggcatggataatatttttgacgagaaacagttatattgctttcttttctacaatgtaatttggttgcatttgtatatatttgagttctaatttgtaggtatctgaatgttgtcgtagggcaatatactagtgttaataatgctctcaaattggcagagatggcgcgagaggacaaaatctcttgtcttatccgccacacacgtcgcgccggccacacaaaccgcgctgatcccgggcgcccgctttagttcactcccctgtcccctcctctccgcgcagcggcgaccaaaccatggagctgtccaccgtcgccgccgcagttgcctcggccgccgcgcgtccacacgggcatttctcctctccccgcgcggcctccgtctccgtctccgtctcgtggaacaacagtccctcgctcgcctccacctcacgacggcaaaggctgctgcggcggctccccgtcacctcggccgtcgtggagctccgccaagccgctgccgggggcggagactcgcttcgtgtcaccgagacgcggcagcctggatccagtgtgagtcccccgcccgccttccccttccttgcctcgccacgttgcgattgcggctcggtgaatgaacaatgaagcagggcgcgtactgttcgagcttccatggtttgcatatcttgcagtttgccgccacggaggctgctgtgatgggtagtgtgagtaacagtgggtaaagtttcgtgcttgatttttacggccacctggctgtgcgtgtgtcgttcttggcaggttaagttcagcgtggaggtgcctacttccatcattcacgactgttaccaaaccacgctacaggagtacgcgaaacgttttaaggtatcatttctgtgcaaactgcaaacacgtatgatatgagtagtgggggtacacccataagaaattataaacacattggttggttcctccaggaggttgattatgttacaaatgtttcgtggcacagcaagacattaagctttactacttcaaatttaatcggtacatgcttctgtgatcatgtacttatgaatggggtcatgctctacgcagtgcttagcacactgatagttttctggatgtgtggccaagtgtacgctcaacattctcattaaaattgtgcctcatcctttttgtgtaaaataaagcgctttgaaactgcaaacagtcagccctgctgcttgcaagttccaggatttgtccacttgtgcaaaattcgtcaatttatcatagctacagtacactagacatcattcaaagagaccagaattccaaactggtgcagatgtttcttcagagtaggatgctgtctgtcagttgtcacttaccatgtgatgctgtatattatacagtctgttctgatgtccatgctgtttcttcttgacaggttcctggatttcggcctgggaagatcattccagaaaacattcttataaactatgtaggaccgcaacatgtacaggatgccacaattgaagctgtcttgaaacatacacttcctcaagcattgtcctcggtaatgaactcttagtcctatttggggaagcatctctgatgtctatgatcataagctgttggtttcaaagtgctcatggaaaccaaaatctagttttggtaatctatatttttattatactcattcgagtgatggtgaagattttgtggtgaatctgtcaattattactgaacagacagcattatctactagcatttcatcatccctactgaacagacaactggcaaggtgatctgcaggcaacactatctactagcatttatgtagaaattcaatgtgcacctttctgtactccatatatctccaaaatcacttcagcagtctgaaactctgaatatcttgttgaaccatgacttttccttcctccatattggcatatattgtatgacatgcacttactactacgtacatctatccagctaatgccttcctttttttgggtgtaaggtagaggagagggcattagaagattctgttcgcattcttactcagtttgatgatatgagaaattctttctcactcgacaatgtgtttaggtagacagttctgccatatatatgacctactcatttcattttttttaaagaaaattgacagttctcaacgaacaggttcaacgctaatacactatcgatcatgtgatcttgaggtcatatactttgttaatgtcaaattttggtcaggtatgatgttgctgtggatgttgtccctgaagtccgatggttatccgaagacaaatataagaacctcaaagttgtcgttgaaatagatgaagctgttgatgcagaaaaggcagcagaaaaagagcttcagcgacgtcataaagctctgggcttacttagagttgtggctgacagaggcctccaggtaattctataggtactctagtttgtaacaaactaatgacactcagttagttattcttgtaatgaggcatgtctgttttgaagcaaatcatgggcccactcattttacttgaaactaggcactttcagcaactattgcattattccaatattctttgtgttcctctcgtacgtttatatcccttatttcttattttgtctctactctgtcgaattgaccttaaatactcatagtaccaaccagtataggcaatactgttcaagactggtaggacctgtgaccggctagctctcagctgaagtgataagttgatagccctggttgttctgcctctgagaaacagatactgatccttgctggcaattttccattgaattatcgacagtcaaatttgctttgttacagtacaggcctaatctgatattggcgccagtactcattttatggcataaatccatttgctcaataaatggttgtaacgtttatctgtgcaagatgcaactggagtctagagttctttgttccctttccccttcaaatgtttccttgtaatcaacaagcttttatttttgaaaagctactagcttcaacaataaacagatattgcgttatctaaccgcattcattttcttggatatatgcagattggtgatctggtggtactagatatttttgcagacagcattaacagtgatggctctaaaggtgaaaaaatttcatctgccgagagtacaggtttgtcaatactcaatttttcacgtatctgacttacatgttattttcataactttgcctttaaaatttattatgagttatccctgattagaaaaaatgttattctaaattctaatgctgtatatagaaactactgtgcctaaaagaaatgctgtcatgccacacttgttatgcctgctgagttttctttgtgcaccagttactatgctaactgagacaactgccttgcatttcttttttttttaatcacagtgttataatatacctactatgtttttcaggtttccacttggacactgaggaaactaataaccttgttcctggatttcttggttcattaattgggattcgtcctggtgaagctagatcatttcctattcagttccctgagtcatttgagcaagaaagtctaagaggtgtccatgcacagtttactgtgagtgttatttctaaaagatcacagacaaagatttgtgttcatgcttttcactaatcacttcactttgtgctttatcacacactcattacaatcaattaatatcagcagagggtgtactcccttggttctatcactgcagctggtagcctggtactcacaatcccattttcaatgtattggtgtaggttgtgtgtaaagagctcttctacagagagttgccagaaatgggtgactcacttgctgtaaagcttcttccaggatgcactacaatagacgaggtttgtattttgtttctgtagtaacgtactcaactttcttggacatgtgccagtaaacctttttttttctttttttgaaaattagtgccatttgatcctagtgcatctattcaaatattatctataaactgtgaacagcatatagctgttggttgattatcttttctgtcttagtaatcagcccctctgaatattgcaggttcgaggacgtattttggaaagatgtaaagaagtagagaaaatggccatagaacaagcaaccgataatgcaatccttgatcagctcgggaaggtattgctcttacttctgagacaacctatcaattctgaagtcttggtgcagggtagatcattaacatgatatgctttcttcaattattcaaattcttttgcaccttctctccaagatcatttaaattttcactaatctctccttggtttgcttagttggttgaggttgatgttcctcgtgccttgtttcaagaacaaggccaacaactttacggagccaaacttctgcagcttcaggtactcaactgtctaacaatcaactaattttcaaccaaccctttctgaataatgtagatttattaattcctgcaggcagaaaggaagctagataaagaccagctagcatccttatcgacccagaggtcagttcaggcgtacctagaagatgagaaggagaatattacaagaatcattaaacagatgctggctgttggtgatgttttcaaatccgagaatttacaggtaacaataatacctgggtttcgttttttttttgtgtgtttagttgatgctagcaaacctcctagctttcgcctttagttgaagtatcttttatcagcattaactaataacaacaaatcatcatgcagtactctactgaacagctcatcaaggaagttgaaaactccatagcagagttcaaacagtacaatcaagactatgatgaggacaacatcaggcaacaggtattaattccttgatttgggtatttctggttgtgagttccttcactaaacgtctaaactgcagcctagctattttttttgtctgatttaactgcaattttgattttcttgatattatttttagtgtcttttcatctcacagatgtcaattgtcagtgaatcataagttccatgctaaaagggattatctgcctaaccttatattttcccatgaatggaaaacctcatttgtatgtatttctatgtggaattcaatgatgcaggtccaggatgttctagaggcagcgaaggtgcttgaatggctcaaggagaactgtacagtcgagtatatcaggcgatgagtctatgatgctgctgggtcaaggctctctgaacgtgagaaagatggctggtgtggcggtgggcaattttgtgagtgaccttggtccttgccaaccaacccatgcaatgaagaatcttgcgcatagcagaccagtgcagtgattaagattttgtttctatatagcataagaaagaagtatactatattttgtaagtacaatgcgagttcacaaaagttgtacccagtctttaagaggttgtaatccacatttcaacagatcagccttgcctcggttttttccttccccaaaccccactcatgtgggagcctctagcactgggtctgctctctctctctctcaattgaatcaagagttctacatccgctctgttgtgtcgtctccctttttcagttcttcaatttgggtgtgatgtgttggactatgtgcacgacggatttctttgtctacatgaaaatgtggagttggaagcatgcttggctggttgctactgcttccccgtggcttgcaatgtgcaatgtatgcggatgcttccccgtggcttgcaatgtatgcggatgagcaacaattcagttaccattttatagtatttcataagctattttgtatagaagttataaaattctaacagggctgttagagatggggccatttgaccccccatggggattgggcaatgatcagggactactagcaatggaatcgggtctgctgcttcatgatgaatgccttgaccacctgccggaatgcc

SEQ ID NO: 4839 - DNA, 5062 bp, Sorghum bicolor
cctgtgcaacccagcttcatgtgcaacctatgtaaccaccaattaaagccacaggatctagatccaacatctgaggtttttttcacttaaaccctcccatctagatacacacgggttagatttaaacccacaagtggagggttagatcctgtggccttaattggtggttgcataggttgcacacgaagctaggttgcatatgatacgttgcctaccaagctacctatctctgatgatactaacagtctgagatgcttataacgataatcgtgggcacgctagtaatatgtctttttatcaaataataataataataaaaacttcggcggaatatcagatgcctagttttctgtcctgatttgagtcggattggaatagttcaggagcagaagcttggcttacaggtaggtaccttcttgctgccttataacaaacatggatccctaaaataaaacagtaaataagccgagacaacaagcttcctgcagctccaacgacatcaatttgaggccgtcggtatcgactgccaagaaaaggatccagctaagaaaactagtaacaatagctggcctggctagtggaggagggggaaaaaagaagaagaagaagaagaagaagaaggaagctaagcacacacgtaccgtgtcacggcaatcgatgggtagagcagactgatcctgcgaggaagtaacactaacagtggctagagattttgagatccggcaactccaaaaatgagatgcatagctccggttcaggactgccctttgtggattgtggattgtggattgtggtgggtgaggaacagaggaagacgacggtcggagactcggacctctcggtcaacggttgggctgagttgttgtggatattgtcaaataaactattttaagcctagttacttcatgattagataatgtttgtcaaataaaaataaaagtgttacagtgttaaaatccaaaaactttttttatctaaacaaggccttaatgctctatgcatgtgtcataagaatcaggccttgtttagttcaccccaaaaatcaaaatttttttaagattttccgtcacatcgaatcttgcggcacatgtataaagcactaaatatagacgaaaataaaaaaaattacacagtttacctgtaaatcgcgaaacgaatcttttgagtatagttagtctataattgtacaataattgctagataaaaacgaaagtgttatagtacccaaaactaaaaaaatttaaaaactaaacaaggccttgtttagttcccaaaatttttcaaaatttcccgtcacatcgaatcttgcggcacatgcatgaagcattaaatatagatgaaaacaaaaactaattacacagtttacctgtaaatcgcgagacgaatcttttgatcctagttagtctatgattggataatatttgccacaaacaaacaaaagtgctacggtagcgaaatccaaaatttttctcaaactaaacaaggccttaatatgatgggaaaacttgaaattttttagattttaggtggaactaaacaaaacctgagcaaaaaaaaaaaaaaaaaatcgaactgtataagctactagttcacggtcatcaacagcaacacggctgtggatattgtatgggctgggaacctgggacatctatctgcgacacggcccagtggaggcctgctcgatcaagctggcccatcgccgttccccatctgcccgtcttggctactcgaccggggcggcggccacctgaccctttcccgcccggccgcctctgcactcgccgcgacggcgccacagcaccgccagccgcgtgcccgcccgattctcaaccccgacgcagcctccacggagccatctcgatcctgagttgcccagccgtccagcgccgccgctggaaccggcccgcgcctattctccgcgccaccgccgctcccaatccgagaccgggaggcggcggcggccttgaggagctttcagccgccgcccgcccgccgccatcatgctgcggcatctccagcgatccctccgcgccattcactgcctacccgccaccggccacgctgcctgctaccccgtccccctccaccggtgagttccttctcttccgttacccagtcccctatctattagtctttatatcccttcaaatcaccgtgtttccctttccttcttttcgtggatttgaggaaacggagctatgttttctaaacactgactctgagactaaagtatttctggttattatagataaaaactagttctttttttttctccgttggcaaacgtctcaatctgtgaattgtgatggtggaaattgaatttctgaataatttgattttcgaactataaattgcaatgctgctaactcttgcacttaattttattagcttcatcatagtttatagtcccttaaggagacactgtttaataaacttcctttttacttattacattgtgcaggttctgggattcacatatagaggtacacgcgtctgcatcctaagcaagaagttcctcttccttaattctgtttattagtcctaaactagttgcacctctggctcatctgtttagcccgtatctggttcgtgtaacaagcatgctatcagagatttctctacttccaaaagagttacaagagactcaatatatcagcagaatgagttagaaccaactacgcctgtgaaggtatccacaacactatcacactttgctttctactgaaatatttctgtttatctttgttgctactttgtgttgccattctttcctttctggttgatcactatttagaaatcctatattatttttagatgctcagcatgtcgaatagcctagtcaatattcaaaatacacgccattcttcggatgcactgattgcattgaatagtttcttgcacatttctgggttgcttccgtacaagcatttatgattctttagttttgttgatttgtttagcttccgaaccatggcattatataaggtgggtataaaagagtttatttttttcttataaacagggtactgacgtaataattgatcgcatacgaaagagcacaggaaaattggaggaaggccctgttggaaaaaatctgtcttcagcggagaaaaggaaatttcttgtcaacactgtatgtacagatagtattgatatataatttgtttaccctgtacggaaaatattctagtatgtttcaaatgatgatgatacacatactaataatgtaaaggacgtacccagtgctgagagcatcctgcactgtgcggggtctggggaagggtattagcagcaagccttacccttgtgatgtgcaaatgcaaggaggctgcggctcgaacccgggaccttccggtcacagtcggtagtactctaccgcttgcaccagatacaaattgtgcaagacattttatagacagtttcatttctccggcatgataatagatattagtgagttcacatttcacatgattttcttgattttggtacaagattgataacaactaattctttgtatgatgaattgttgaccttaggaaagtagattatgtgagcacctgccggttcttctttgaatgattaatatatgtataaaaataacaaaacattccattaatcttctggtattgacctggccggccgctggccacctgagttcacaaattataaccttcattcttgttcagtgtggataaaattgcaccacttgtgcatattgaaatttgtcaatttaaatgcagtcatttagctgcttttgcctagtgcaacaaaattaccaaatactgcattctctaactgcagcttcttagcctcgaagattcaagagaagctgtttatggcacccttgatgcctgggttgcctttgagcaggattttcctttggcttcactgaagcaagcgctttcagttcttgagaaggaggaacaatggcatagaattgtccaggtattgtatagtgtcagctgctttcatttgtatttgtcatcaatacattgtgaagtaaatgtctgtgactacatactcaggtggtcaagtggatgctgagcaaagggcaaggaaatacaatgagaacatatgagctattagtgtgtgcacttgagaaggataacagagctgaggaagcacacagaatctggcagaagaaaataggccatgatctgcattcggttccttggcgtttctgccgacttatgttggctatctactaccgaaacaatagactagacaggctcatgaaggtttgggcctaaactttgtaactttgtgatgtagtttatattttatttttacatatttgtcatttgataacacggcttatatgaattacttacctgcctcttctgatgacttagctctttaaagaactagaagcctgtggtcgtaaacctccaagcaaagatattatacggaaagttgaagatgcatacgaaatgcttggattactagaagagaaaaaggtgttgcttgataaatacaaggatttatacaacaagccatctcgaaatgatcgaaagaaaagctccaaatccaaaaagattgagactgataaaacatctggttagttcctattcatcctgtgaaaagttccttcagacatcatgtactatctatatgcctgtaaaattcctgtttgcttcagatgctgaacttagttcttttacgaggatatatgactagcgttgtttaatctctaagctctagagtattcccccagtttcatgagatcaattaatttgttcggacactagaatttacaacattgttattctgttctcagctgatggcagtaaggaaagcaatatggaaacatctgaaaatcttgaagatcactgttcctcttcagttgagaaatcagatgcctctgctgagtcatgataagaggtaatgtaaactaggcagtccatgacttttagtttacagttatgtgtttacaactgctggttggacattacgtctcccttatttattttccttccagattcatcactgatccactgatgtggccataagatttgaccgaaacatgttgatggcagcattagcgatcttcatgctctcagaa

SEQ ID NO: 4840 - DNA, 6186 bp, Sorghum bicolor
caaatacatcaccaatacaagtttagctctactcgtagagctactcatacaaccattgcaacaaaagctgatttaccactgaagctaagttgtgccaaatatgcccttggctagttaactattagcagctaatggatccaaataagaccttagttgtttatttagctaacaattactcaagcgggactgaaaaggtattcaaacaggaaaaaaagttatcaagcgttaggtgggtgggtgtgggaggctatgtgtacctcgagagtcacaaataagtgtaccgctagtatgcaactgttcttacatctcttttaggttagcgaaaaaaatattacttcacttgccccgaaaactaaaatgaaaacgtctaacgcatactcaactcttaggtggctaggtcttaagagctacctttgtctcaaaataagtctcatcatgcacttcaagtagtcaaaaattttaaatttgactagatatatagaaaattgtatgaatatttatatatctaaatatgtttatactatgaaaatgtactaaacaattaatctaatactacatctattcagtatcataaacattattacattttatatacaagtaaatatgtttgtgcgttgcgacaggaggaacaaagcgttcgacttgtttgctttagcttgttgcacagctgtagtggccgcaatagcttaattttaataggtgacttgatgctgtgaatggttgctgcaacaattacaaacgaaagggtggagcaaccgcctcggtgcggcgcgagacgcaggcctccaccccgccgctgcctccaccgctactctccctcgacgacctctcccaccaatccctctctctgcaaccagccacacctccgcaggcgactgcgaccccatcacctcagcccccgcgtggcaccaacctcttctctttgccaatgcagtccaacggctcgccggccccctcggcatggtgaaccccctcgagggaggagaagcccagggacgggtcaccgatggatggcgtcatgcagcaccagcagcagtcctcgacaacactgttgggagacgttgccgcctcccagggaggtggcgcggccggagatgccgagagattcggctccggctgctggccgggtcgacgaggagtgggtcactgttttcgggtatgtgaccttgacttcaggacccaactaattcgatgcaatgggtgcggtaggatgtttgcagttttgtataaactgctgcattgcattcatatagttgtatgttttgttttacatgctcttgaaaggaaaagaaattggaacgtatgtaaataggtatccagagtggactccgttacgtatacatacattgataagagacgtagttgatgtggggatgcattcatgactcgagagggaaaaagaagatggccggaccaactggacaaaaaaacaggtgtgagaaattttacctttttattattaagtatagatttggttacatttacaattccttgcctcgaaatgatgattaatctcatacgtgatattggagtggtatcggagagctaggatcaaaagcatgcggcgccagacgtttcacacaacaaccgaaaccaatgctgtcccggttttgctcctactatacgtctttgcaacagcgatgccggcaggggtcacgttaaacatggcacgcattagtatttttctcctgcttggctcctcgtactttgagaagaccaccaacaggaacatataaatttgcgagatttgtttttctccttacagctttccattattttagaaaatcgagatgtgcttggcagaggtggtagccatgtgcgtgaagacatttgaattcatggaccagatcttggtaacgtgcctctctagcctcaccatttgttgctatgcacccaacgagcatctaccaagcaagcaagagaaacagagagtgagagagagtgtgtgtgagcactccactgagcgggtcgagctgagcatggagctcgccttgggggccatggccggcctggcccccaagctgggcgacctgctcatgcaggagtacgtcgtgcagaagggcctgaagccggacatcgtgtccctctccagggagcttgtgacgatgaaagctggcctggaggacttgtctaaggttccaccggagcagctcactgaggtggaaaagctttgggcacgccacatccgggagctgtcgtatgacatggaggatgctgtcgatgactttgtcctgcgcgtggccggcggagagtgtgcagctgatgccaacgtcttcaagaagatccttggcaaggctgccgctgcggtgaagaaggtcaagcatcgccgtcagatctctgacaaggtcaaagacatcaagaaactctccaacgagctggctgggctccgtgccaagtacacagttagaggcgcaggggctgatctggccatgagcaccggcatcgacccccgtgtcctcaatctgtacaagaaagagtcagatcttgttggcattgaagagtcaaggaacaaagtcatcaagatgctgtctatagggaccaaagatgatgcttatactcatgcgtctgagctgaacctgaagatagtgtctatagttggggttggaggattgggtaagactactctagccaaaacagtgcatgatatgcttaagaatcaattcggttgttctgcttttatttcggttggtaggactcctagtttgactaggacatttgagaagatgttagtggaactcgataagaattataagcaagtcgacatggccagatgggatatagagcgatttggaaacgaactgcatgaattcttacaggacaagaggtatggtatgtccatgtcattttccattcaaattcatgtcaatgtctttttttttcactactaggaaagcatgagcaatttatacattcctattgtactccgagccctaggccagcattcagttcattcgatgaaatcgtttatgagatattccagttttgttaaaaagtacaacgaattttctgccaaacatctagaaaaatatttggaatttcaatttttttttagttggatccttaagttgtagcacatttgaattgatagacacataatcctctcccatggagtcataggctgcaaatttttcttgctagaaccatgttcatgttacttatgcttaatgaaatacatgcagcacatgttctcgaaaaaaaaatgttacttgcgtctggtctatttggatactctatactgatttgccaaactattcatagctctgcattcttgtgtgaattataggtacttcatcgttgttgatgacatatgggatgttgaatcatgggaagcgataagatatgccttgaaggacaacaattgtggaagtagaataatcattactactcgcaatttggaggttgccacaaaagcaggagaggtttacagactaaaacatctttctgatggaaactctagaatattattctacaaaagaatacagagtcaggaaggagaaagtcttgatggtgtatcaggtgaattgtctagtaaaatcatagataaatgcgatggcataccgttggctatcattgcaatagctagtttattggttgaaagaccatatgaggactggtcaatcgtgtatgattcaattggttttgggaatggagacaatacaacaaagatattgtcatacagttactatgatctaccttcttatctgaagccatgtctactgcatctaagcatacttactgaagactctatccgtgatagaaagagtgtgatttggatgtggataggtgaaggttttgtccatcctgggaaaaaggagggtagccaatttgaagttggagaaagatacttcaatgagcttgtcaatagaagcttgatacaaccaatggacaatgatttcacacaatgtttctgtattcatgatattgtgtttgatcttatccgtaagttatcaggcattgaaaactttgttactattttggacagcagtgatcaacatgcttctctggacagtttaagaaataggaagaaaacaggcatgactcatacggataacaaggtacgccggctggttgtccgaaatcaccatgtgcagtgcttccctgaagacaccatgccagaggtgctgaggtcatttaacattgaagatagtaagattgagattatggaccaacttcataggtttagagtttgccgtgtgctacatttacagggatgctatgtcccgatcagtctaaagcacatagggaggttgttgcatctcaagtacttaggtatatcttacatagcagttaatgagcttcctatggaacttgggcatctaaagtctctacaggcactagtattagtcgatattgggctagacgagctaccaccggctgtatgttcacttacacaactgatgtgcctgatagctgaggggttcaaaaggttcccagctgacaggatggggaacctaacatccctagaggagctacggttagagaccgtagctggtcggagtaccacggaggaccttgtggtagggcttggcaagctgacgaggttgaggatggtcaagatcaccttctccgagaaactagatgagagcttgcaaaaagctctggtgcgatctctttgcaatctgcgggagctccaggaactagtgcttgcttctacaggattatcccagcagggagccactatgtgggaaggctgggaaccacctatgcagctccggcgcctccttatatatggcatccgtttctcgcggctgcctgggtggatcaatcgctcccgcctgccacgcctctgcttcttatttttgggtgtgtacactattgaagttcaggacctagataacctagcgagcttgctagagctgagctacctcgacctaggtggttacagctggcctccagggtatactgttggtacggacggcttcaggaatctgaggttctgcaaagtgggcacagcgctcaagtttcatatgggcgccatgccaaggcttgaagagctgcagtttaaagtttatgcagggtattggagttgggtagaagatggcgtgccgttggagcagttcccaacaaaggaagtaatcgaagatcttgacttgggcctggataacctcctttcacttgagaaagtcatcgtccaagtggactgctcgggtgctactgccgcagaagtgcaggaggtggaggccatggtcacgcgtgcagtggaaaatcatcccaaccgcccaaccataaaaatggatcgagaatgtgaaggaaacatcttatctgacgaacgcagggtggctctggtgaggctgtctcttccaatctgttaaaaaaaagtacgttttcttaattatatgttcgtgatgagtacctctttactgactatgtatatatactgcattctgctccttgcaattctcagcttcagcaacacattgaaagacatctcggtgtgctcgagtggaaggatgcacctgatgcgcaattcatcagctatctgcggaagtaccgacatcttcagaaagccgttaatttcatcgactgtgcgggcgccaggatgtgtgaggtggagaaagtggaagcagcttttaggcgtgcagccgagcttcatcctaaccatccgactatccaactgatcagaacaaacaccgatgaaatggtctcctcgtctgaccgtccggatacagaggtagctgcctcttcctggattatttttttttcccactagttaatggaaacgtcagctttgactatgcaacttaccgccagcgctattttccttcacaaactccagctggacgacgatcatgatgattcaccagataatttgctttgcaaactccagctcaggaattgatagctctgtttgtcaatccttccaactcagcaggtacgtgcaagccgatctgcatgtgtaaacactccaaattttattgctctatctagttatcacgattcactgtcatttatacgtgtcagtatgtataaagaatgtgtcatacatacatattttcagtgttggaactctgaatgtactgcaaattgaaggtactagttccaaataatcgattcggtgattacataatgctgcgtacacaatctcaatgccaaagaaaaatgtgtatccaacaatagtcttgtgcaatgagtggttggtttgtttttttttttgtaatatgtttatactccgtatattgtgtaagc

SEQ ID NO: 4841 - DNA, 5951 bp, Sorghum bicolor
aaagatggagtgataggtctaggacctgtttgatagggcttctcacgagagccgtttcggagaagccataatttgtggcttcaacagaacggttgtggcttctctgctttttatttaaaaacggcttctccagacaaaaaaacgtttgttaaggctcctatcgaggagccagagagaagtcctgccaaacagacccttacatattggcccaacaaatttctcctcccactacttacatctattgggccaatagatctctctacctattttcttccccacgtttcctcccgacgcccgaccattttcttccccgcactttccatctgccgccgccaaggagcggcttcctccccagcatcccatccctccccgaaggccctctctagcaacaccaccactcctccgcgacgtggcctgctcacggcgaagcttcaccggcacaacgcaacgcggcctcccagcgggtggcctcaatggttctcacgacctgctcccgacgctcggcctcaccggcgtaggtggcctcaccgacgctcgcgacctgctcctagcgctaggcctcaccggcacaagtggcctactcctagcacgcaacctaccctcgggcttgttctcttccctatcgtgcggctatggagaaaagaccaacgaagaggatgagtcgtgggacccgcgtgtcattctctataaggatgggtttgggtagtctgttttaggtagtactgctggagttgagagcaaaatataggtagtagaaaaattgatgcctacctaaaaagataaataggtagtctgttttaggtagtactgctggagatcgctcttaggcttgggccccatcccgcgaaggccctcggccgtggcacctcatgccctccccttagggccggcaccgcactattttacacctaggtgtccgtaacctaaaattgaacagcattcagtattatccaaaactacacgtaggacaacgaaatactaaaaaatactgaaacacgaatactaaatgataccgaattctgtttagtgcaaaatagcactaccgtgtgtgtttgtgtatatatatacaccctaggtgtagaatactattctacaccgaagtgttatactgagcaaaattcagtatcgttcagtattcgtgtttcagtattgttcagtatttcgtggtcctgggtgttggacaagatgatactgaacactctccagtactgctccgtattttttcgactcagttttgacttaaggtgtagagtaatattctacacctagggtcaaccctgatgggttgagatccaaaccaaatccacaccaatccaaaacatatatatactgaaagtcaaattcaaaccaaattagaccatgacttcaatcatccacaccaaaccataccacttatgcgctagacgcattgaaatgtatttccaacccaccatttcaccggcaccacatgctattgtttatatttagccataaacaaaagcaaaaaataaatagatagaataaaaaatcattataaactctattattcacaaccaaaccagatcagcctactttaatagggctcaaaccaaactagtctaacgaccttttcagtctgtttcaatccaaacgaacacaacccaaaagtaaaaacaaaccaaaaaaatctggtttaacccaaaccattgtcagatttacctagggtgtagaatagcgctgtcgtatatatatatatataattcaagtaatgtggtaacgaaaagccaatcctctacctggatcatgatcataccaccgtatgaacggtgtttgaagtttgaaaccatgggcgtggtggtgctggtgcacacggaaacaaaaccgttggcaagaaaaagaagcggaggcgcacatgggctcccgtcccgaccgttgcccggaccgggagcgcgcggcccatttggaatccactccaccatcctctccgtcttctcccccacgcggacgcgccgggcggcggcgtcgcattcacatttcgcctccctttccctctctcccccaattcaaaatcaaccactccccttcccttccccatcctcctccctactagggtttgcctttgcggcgtcgccctcatccatcgaccagcagcaacagcagccgacgatcgatccgtgttgggcggcgatggagatcaacatcgtggacaagtacgagaagctggagaaggtcggtgaggggacgtacgggaaggtgtacaaggcgcaggacaaggcgacggggcagctggtggcgctgaagaagacccggctcgagatggacgaggaagggatcccgcccaccgcgctccgcgagatctccctcctcaacctcctctcccactccatctacgtcgtccgactcctcgccgtcgagcaggccgccaagaacggcaagcccgtcctctacctcgtcttcgagttcctcgacaccgatctcaagaagtacctcgatgtctaccgtaggggacccgccgccaggccgctccccgctacactcatcaaggtgtgccctgttcacctctgtcatttgtagggaaaaaaaaatgatactttttataatcgatcttctgagcaattcagcgtttcgtgatcggaaataagtatcctgtgcgttgcaattcacatccttaaacttaattctgatgagaacggtacaattctgatcagaaggagaaaaaaagccacataaatgtctactgctcatgttccaatcgatctgtgcaattgatcactttgtgaccagagcaaactagcctgcgtgttacaaatggtgttttcgggtgtgataaaaggtgcggatcttattggatcatcataggttcactgactgagaacaactgtcaaatcaaagcacttagctctgaaattaaatttgtatgttttgtctgtataagttctggttctgcacacaaaggcacatcaaattgtttctcagattcagtaggtaatggttgtaaatcaacatatactgattataatttgcagtaagctggcagatgatgcgataacctgtgtttaccatttctcaaattaataacaagagagttaagttttggaagtaactatcctggagtgtttattgatattggtccccaggtcccataattgaggttccttccttttgattcgaaaaaagttccagtacaacacactgtattttgactagtgaagcatttagtgcatcatggacgatgagtcattctcctctacctttactctcttgaaaacttgtttagccaatgcagcaattcttgatcattatatgccaagttctgaagttcaccctcctttggttgcttttgaactaatgtactttctttacttctttctagaatttcctgtatcagttatgcaaaggagttgcacactgccatggccatggtgtccttcaccggttggtttctcttgtctagtttatgttgctgaactcatcagatgaatacaacatcacattttccacttatatggttcgtgctcaaatttatttatagggatttgaagccacaaaacctgctggtggacaaggataaagggatactcaagattgctgatcttggtcttggtagagctttcactgtgcctatgaaaagctacacccatgaggtactggttaccatccggagttggattgcctaatgcaattttagtttttaacagagtttctaagcatgatccagtaagctctttatattctattgctgtagattgtgacactttggtatagagctcctgaagttttgcttggagcaacacattactcaactggggttgatatgtggtctgttggatgcatctttggtaagcgtattctcctttttcagccttgaataaagatgcgaagtactttgccttgtgctgaaaactcgatgcattatatgtatataatatatggtgcaaaatgcaataacagatgcatgttcttgtacaaggaatttcgtagtgccccacaatccaaactgtccacatcgttgaatttaggaccaaccaaatagcatattgtgcttaggattaatatattgtccttgattctcttgattaagagatggtgtatattcaaataattttgtacttatgttgaaaacttttaccccactgtgatgttcataaattttaatgcagctgaaatggcccgacggcaggctctctttcccggtgactctgagttgcaacagttgcttcacatcttcaggtccttttcttttccttctgtattcagtcgttgctaccataatataagcagtaccttccttagttgctaggatagtatcattctgataattgtgaagttgttctcttatcctgttgaaggaatgctggcacataacattttgctacagtttttatatttcattagttctttcttggggtaatctgaatgtgttattaaatgagatgatagtttgatttttctatactcttctctgttagacactactccaatggctaaattacacttgaattcttgattgttttaactttcaaggaatagcttgcttgcacaattaacgtcattctatctcaatctggttctacaaacctgtattgtacaatgtattgaccaaaatatgcttttcgaaaaaaaggttgctgggaacaccttctgaggagcagtggcctggagtgagtgaattgagggattggcatgaatttccacagtggaagcctcagagtttggcacgtgtcgtcccaacactggaacctgaaggcgttgacctgctatcggtaagttctaagcgtgatttacatgctgatttacttactgtgttctcttaaattaaaagtgttaaatcacctgaagtcgatccttttctttttgtcatattttgttttggtgccttgccccaatatgtgacttgttgagtgcatttattcttaacacacttcctaaaatcaatatctggttatgctttaaaaaagaaaagtgcaattggttgtttcactgtgccattcaacaagaaactgagcgatattttgtttctaaaaaagaaagaaactgagctgacagtctgcataattaatgtgttgcagaaaatgcttcagcttgatccttcaaacaggatatcagctatagctgcgatggagcatccatactttgacagccttgacaagtcccagttctagccattgtaccatgtgattcagaagtgaaggcgctactctcttattagtgagatttcaaatggaggtatgaatttcacttgccatctaggcaactggttcatactttttaccgatctattagtgagcgaaagttggcatgcctatgttttcatgtgagggtcatatgtgtttcacctttcctgttatagtgagtattgttgtctgttgccttaaaaacttcttgtgacgtgtaacaagagttacttgtgggaggcctgtgataatgctctttatttctcaacatccattttcttcagtatggatgtgaaataggaaatctgatttcctgattactatcttcaagtttcagttttcctttttgttcttttattaagcatgcgatttcattttccttctctcctgacaccgttgcaccagctcattaacaaagttaacaaaactgaaattcatgaggtgcagatagtgattttttatttctaacactttttaacactattttaaatctaacaccacataacttttttttaaaaaaaaactaacccttttgactcgctgacatggcgcaactgagaaaaattatatttttttcgagcaatcttggacgaagatgatctttatatgaaaattgtagttctcaatgagatctacaacttcgtagttttaagtttttttatttgaggtcgttaagatgctcaaaaaaaattaatataaagttttagcttcttattaatcacgtgcaagcgcttgtcgctttggaaaaatcatatctttcttatatgttgtcaagtagagataccttatatacgaaagttgtagatctcaatgggattg

SEQ ID NO: 4842 - DNA, 2854 bp, Sorghum bicolor
ttatgaaagataacgcatagtaatattctaagtttgcattgaacatatccatatatgtcattctgaaagataaataagttatttatctttatatttgtacataccttcgtcatatgaaaaatacactaaaatagtaatacatattattaaaaaataaattaatatccacaaagtacgacacatatatatttctaattaacaaacttctataatcataaaataaaataattatgatgctacattccaccatgtatatcaaataaacacgtatacgttaggataaataattattttaacaacttatgaaacacaaaaaaatgttcacttaacaaactacgtcacaataacacttaatatttatactccatgataataaattttataaattattatttgaaataattttatatatctttgctgaaacattatgtcaaaccaatattattaatttaattttatgtatattgtgatacataaataatattgcacaaaattaatcctacgatataacaaattcaacatatttagtgctggcatgcaagtcgatttttaacttatgtgcaaaaataatattactaggacctacagtctttttaagaaaaaagaaaattttgaataaaagataaagaatactagaatggctaattggcatgtgaaaaaatttcaacaacttgattaaaagttaaataatgaatactagaaattctaactagaggtcccattggagcttgcatgtttatatatcttaagactagattttgactaatacatattacactagaaaaaaatattagaaattcaaactagaggtctcactagagcttgcatgttaatcatcacaagacttgataggaaaacaaaagatagatcctaaaaattttcataaagttcagaaacatcttaccattaattaggtataacctaatcaccatgtattggatttattctattttctaaataattatccacttatgctatcatgtaaaacaatagaaactaatccatgactctaaattatattgtccacatatatcgttaagaaaaatgatataaagtagaccaaaatttgcatgaccaacgtcatcttattatgattgataatatcataactcaatttttatctcattattagaaaaattaaataccccgtcaaatctaaatctaaattatcaacatctcctatcacaaaaaaattatttagataacaactaaagcatatatagtttctaaattacccaccactatcaatattaatatagtaaaattatatatatatatatatatatatatatatatatatatatatatatatatatatatatatatatatatatatatatatgtatatgtcgtgccaacttgcatgagcattaggtttctttgcaatgtatggataagtttgccaattatctaaaaacaaatcaagagcattccaaagagaaaattagcctagctatatgcaatcatttggaggacagtcccttgaattatgcttggacaatcagaaagacatcgctgagacacggatcatctatatcagaaaaaagctgagttatggattaacgaacaaccattgcggtgcccgcctaacctaattgagttatggattgacaaacaaccaccgcgccatggatgcctaacctagacggcacacagatgacagaactttattagttacatgacacaacaggtagctctcggctgctggacacacactactagctagactccacaacttgatccatatgatgttcttgacgaaaaaggtgcttctttaatcattcaagagcaaggcacaacaacaagcccgtcggtacacacaccaccgtcgtctagcttcacgtgtatcgttaggcgtgctgttgctgtcacactccacagcaaccaccacaccctccagatcccaccaatacaaaaccgccccccacactcccagctgccgcatgctgcactgccgcactagctagctagcagaacacttgcaaatagtacacacaataatggagcggcaagctcgattcgtcgtcctgctcgtcttcgtcttctttgccgccggggcggtcctcgccagcagctccggcgccgccgccgcggccgccgacttgtcagctggtgctcatcgggccgccatgccgtcgtcgtccctgcacgcgctgcggcgcgtggaggacgacgcgagcagcttggtggaggaagaggaggcagcgtacccgcggaggagggcgctctacggtggcgggtccatcggctacgcggcgctcgccgcgagcaaggccgcctgctacgggccgtgccccgctcgtgggcaggcctatagccgcggctgcctggccatctaccagtgccgaggttagaattgattcaacagcgctgtagcgtgccatgcatgcagttgatctcagctcccggccggcctgtgaggaattacacatgtctgtttcttgtgtgctagttctcgtttttttcttcttttgttgaatgtaattcacttcactatggagtggtccatatatatgttgatatgtactttctctatacttatatataaagaaagtcgtttaggacagcgacacggtctctaaaatctaactttgactctttatttttataaaaatatttatcaaaatatggtatatgtatattttgtaaaagtatttttgaagacaaatctacatcatctcccactaaattattcatgtcatatcatccactaataatcacgtatcactgcttaattgaacatcttaatgcaggctgtccacatcaactccactgagtgtacacttacaaattttaatatatgataaatacacaaaagacattcatatattactgaattgaaaatttacttggt

SEQ ID NO: 4843 - DNA, 6759 bp, Sorghum bicolor
ttaaggggttttccatgtacggttctaatcgctaataccaaactttgaagttgcaactaagaaattaacggcggtggtctaggaagcaatataaatgggtggtgccaattgtcaagagaccattatacaacaaatgcatggtgataaaaatatttgtggcaacctagtggtgcaggaacaagaggtggcaatggtttgcttggatgttgccggagttactagcttgttggtggacgaagaggagattgagatgcgatagggcagccatgatattactagagtagccaaaggcatcagtagtagcatgctatgcttagcttgcatcgttacaaaatatatatatgatgttgttagtttggatagctaccttgcaatcgtaatatatttttgagtgttcacaactaataaatgactaatggcaatagtcttaacaaagtgaataataccgacaacatgatttttcgagtgcatattacttattacacatgattttaggtttcgtaagctaaatattgcagaggataagcttattatctttcatacaaagaaaagaaacttcaatatatctccttattagtcatgatataaatccacgatgtgcatcatttcataagatataaaacggtgtggaagtctttgccatataccactatcgcaattatgaccaataattatcccatgacaatttgtagaaaaaggatagcataagaaaatttagatggtatatttcctatatatatatatattttaaattaaagatgttttggcttttctcctagatacatatatttgttttattactatgtatttagacacagtgtatgtctaagtatatagcaaaagatacatatctagaaatattaaaatatcttatagtttagaacagaaggagcagtagacttagccatatctacatactattgctaaccttgtgtgtctagaggctacaactcggctctaagatattttacaataagctcgcatgtaatctagaattttttagatagtgattttgaagagacgacgaactccaaaagattctttagagcaaaatttacaggaccaaaccgttaatcttctggccacatgaactaatccggctgtgtgaaggggagaaatattgacacaccgtgtattttttttttgagtcaccgtgttagttctttcgaaaattatgatttttagcgtcacaattttgaccatcggctgtaacgtctctcaatgggttaggtagtggggtacatacgacatattttaccaactctgtaaacatcgtcaaaattaaataactagtagcatcatcatcattactctgatgcgtttcaaggatgccgccaaatttaggcggcgaaatgccattttgaatttcaatttcaaattccccgtgggcgcagccgcggcctgcacaccaggataccctcccaagccgccgccgccgccgccgcctcctcctcatcttcttcctcctcgtgttcgtcttgttcccctccggccgcgcaggttgatttgagcggccggcgtcgaaccgaatcccatcccaggaggaccatcaaaagccgccgcgcgcagacatccatccatcatcccatcccgcccgtggtcgccattgctcgccgcacagggcagacgtgtgcacaccgcacacgccaactcactcgccaagaacagaagagggaacaggaaactgacgagctgacgagagggcgagagcgacaaaaaaaactgaccctttctctcacgttaaaatcccccccgctccccgtctgcgctctccacaccccccagcaatccctaccctaatccctcccccgccgccggcgcccagatcgcatctgcgccctcgccgatcgcctcccgtaacccccacacagcgcaagctcctcgcgccgttcgtcgatcgccggctgaagcgcccgccgcctgtaagcggttggccgccgggaggaagagaggctctccgctctcgtagcgtgtttcggatcgggctcccgcgatcgaccatggtggacgtcgctgagtgctcggcggcgcccgtgcccgtgcccgaggacgaggtcgagccggcgcacccggacccctcgtcgatcccgcccgacgcctggcggcgcttcgagagcgccgcgcttggtgtggtgaacaagatccagcccaccgtcgcctccgagaacttccgctccgccgtcatcgactacctcaagcgcctccttggatcccgcgcaggggttcaggtactctacttgctctgctctggatctaccttccctgcggctacagttttgttttgcagtcctagtgttctagtatagcttagagctctcgggctttacgcatcagtgtctagatgtttgctcagtctctgctgcgatatgagcagccatatctgggtgctttgggaggaatttagtcactactgtctcagtgcccttgttcatgttttaggtcatggaattgaatagttagggttaacatgctggctgtgtgttcctgctgtagagttggttgttgccattcttgccatttcatttttatgtgttttttggcgcgaaaccggtatatataagagcttgtgtttttaaattcttgtcgtttgttgcgtgtcaaggtgcgtgattatgagtataaatgtgtaacggtatggatatactttgtcggttgcgcacttgagtctctatgtgatttggtgagtaggactacaggaccttttatggcatacaaaacctagatgtttcatcagtctctgctatgctgaaagcttgtcatatccttcagatcactccaatggctgtttgggtgctttaggaggaatgagtgctttaggatgaatcagtcattactgtctcagtgtccctgttcatgttttaggtcatggaattgaagttagggtaaacatgttgggtgtgttcctgctgtggagttggttgttgcgatgcttgctatttaataattgctggcatgtgatttttggtgcgaaactggtaatatagcgagctcttgtttttaaacccttttcatttgttgctggggtcctttaggtgtcaagtgattattggtgatgagagtataaatgtgtaacggtatggatatactttgtcggttgtgcacttgagtatccacgtgatttggcgggcatgacctttaatgggagggtgaactatgtgttggcatgtgtttttgagtaccgcattaaacgcagcaaaattgttgatagtgtattggaggtctgggcatgccatttatcttagtgtctgttttagtgacgtgtcccttcaaacattgctcatgttatttggaaggagcagctttggccttttgttatgcctctgtcaaggtgtcaggacatcttaaactgatttattctagcaacctgactctatctaagatacattatttgaatatataacatgtatatcattaattgtacattcttaagatgtgctctagaagcatcataaattatggtacaaatgaatgatctttgtgtttgtacatgtacaaatattgaatatgtaactgagtaaaacatggaactttgtgattgagtggcgtttctgcatttatatacttaattactcatagatagttgctaggattgattgtatcgtgaaaggattatatgtaaatagccatgatagttttaccaaatttatgctacaattgttgtagtgtgatgattgtaccaaactatgatcctattcctatctatgagtgaatcggtagataaatctaggagtatatggtgtaagggtttaaaattttactcatgtttttgacttggctgtcgttgttaaggttgttttggattgctgttcatatgagtggacacatagatctggcagacatgtgtcacaatttgagaggtaaattggctacaaggcttacagggataaattcagttgtttaataataagccactaaggcatgttttagtggattacttgtttgcttcctctgcatgtgcctgagtgagatatcgcaattttaccaaggtttggtgctgtcttaatgctatattaatgccatttcagagggattgtactgcaaacttaacctttacgtttgtaaaacataggtcttcccatttgggtctgttccactgaaaacatatcttcctgatggagatatcgacttgactgcattcagccctgcgatttctgatgagaatctagcaaatcaagtctatgctattctaagttcagaacagcataggaaggattctgaatttgatgtcaaggatgtccagtatatccatgctgaggtatttcaatttaccatattgctctgtgtttcgaatgcatatatatgcaatttgaggtcaaacattgatatatcatcttttggatttttcactttactggaggtgtttgtttcatatgaccacttgtctaattaacatacttcgaaatccctgcactcgtacatatgaacatcgatttatgtgcattatgtaaaaaaaatggaatttcccatttctctatacttgaatgcaactctttgtcttgtttaattatgacatcggtggagcatatgaatgtgccgctatttctataggtgagaatgttatttcatgtattgttatcctatgataaatcttccttatgggctatggcaggttaaactggtaaaatgtcttgtacagaatattgttgtagatatatctgtgaatcaaattggtggactctctacgctctgttttctggagaaggtaatatttcaatgttgtttggttcttgctgttgtctttccttaaacctcagatctggtacttgtataatcctcctttccaaattataagacgctttaacttttatattatagacgctttaactttccaaattataaactacatatctagaaaagccaaaacatcttataatttgaaatggaggggacagttaataacataaaaagcattttacaaggactactgccttcttcggagttgcttatgccttcatttacaggtcgatgaaaattttggaaaaaaacacctgctcaaacgaagcatagtgcttattaaagactggtgttactacgaaagtcgcatccttggtgctcagaatggattgctatctacgtatgccttggaggttttagttctgtacgttttccttatcttccacaggtccttgggtggtcccttagctgtaagttttggcctgaactttgctgttgcatctatcagttttttgtgaccttatcaaagttcttcaagatagagtacttcccaggggtgaatgactatctgcccttctgcaggtcctctataggtttctcgatttctatagtaaatttgattgggatagcaagggaatcagcttgtttggtcctgtttccttatcttcactacctaatctagttagtaagtaaatgaactctcaataatgcagtatgttggcttgatgcaacgtaaatttattgatcattgacatgacttttattcaacagctgaccctcatctaccagctattgatgatgatttttttgttccacgggaaaagattcttagaaaatatgcagaagattttagtgcccctcctagaaactctgagagagacgcacaagtattttctcggaagtttctaaatattgttgatccactgaaacagagtaataatcttggacgcagtgtcaacaaaggtattgttctgcctcttgatgtgaattgtggtagtagggactaatcaggtactatggtgatttcctaaaaagattcaagcttaattgtattattccatgtgcagggaacttttaccgaatacgtagcgcatttgattttggtgctcgtaagcttgggaagattcttcaaatgcctgtctgttatactgtcaatgaagtgaatcagttcttctcgaacacattaaagagaaatcatactgggttcagaccagacgacggcagttcacctttatacagcaatccctatggtgatctgtcttatcagtttaataacatcttgaatgatctcactggagatttcgagataaacttccgtaatcttcagtatgcgcaagggttccagcaagttaatccagcaaactcattttactatggaaggcttgctccaccacccctgcaatatcagaacacgcacccttcagatagtcagggaagaaaaaatccacatgcatatgctagcatgaatggagcaatcccttgtcctccttacccatctggttgtcttgcgtggaggccatttattcaaccagatgatcctatggctatgagggcccgtggaataggcacctactttcctgacccagtatgttccctccatggacattctagatatgcttgtagaacttaaagtaacatttctgaataatctgtatctgtcacttgccatgtgttctttttgtttcaaatgatgtacatgtgcgcacatattaatgttcttctaatctgtttatcattttattagagttactatcctttttcatatgcaataatcttgaagatgtctccattatgcttatgagtttactacatagtagaattactttaggttggttaggcatcaaatttgtatttggacagctttgtcttgtattcgtgataattttgtcttgttggatgctgtagagattgtgcaaggatagaccacccgctgggcgtggggagagagaaaaaaatcagttcacctaaaataattatcatcactatgtcagaacagatatgcctgcagtatgggatctggtcaggaatttgggcatgagctaccacagatacatattactggtgcaactgatcatggaatgccgg

SEQ ID NO: 4844 - DNA, 4687 bp, Sorghum bicolor
gatctagtcttctagatagtagagagatggagagcgagggaggagttcagaggaggcgccggcctgtcggtgcctcttcatcaacttgtacttcgacaggatcgggctctgtccggtcctgagatggctcaggctcgggtcatcaacttcttattcaagtaagattcttgtttatattattcttctagtttacgagtctcttttgagtgctttaatctagtgcactaggttagagtgtaatcatagtgtaagcgtggcgcttagactagggttactcatagatgcaacctatattccggatcggtggtagatcacgaacgtgacattcattgagtcctttgtagtccacctcccgtctgtaggtctagcaggaaggtctttcagaccttattacatggtagattcgtactctgtttgcggtcttccatagtaatttccccagttgagtagtagaagacacggactacccaagttagaagtagaaacccatgattgagttatcctctctatactcctattatcgaccccatactagattgatcttcctttaccttttatcttgttaccacttagattttatccctagtatagtttatatctttttcactcaccctttttggttaagttagaaatcatagttgactcacacgtttccctgtggatacgatatttaaaaccctccgggtgaaagctacaacggtatccatgcgcttgcggatcttatctgtgcgcgtctttaaaataccaacactgcatcaatgatgtaaatccatgagttacagaaatttacagtctaaacaattcttgttcctccatttcaatgatgtatgtgtgcccaatatgcatgtccactagttcaaagtaatgtcacaatgatctattgcaaaccaaaacaacaaactctattatgtgataaataagaacataaattgtaacttcagaacagttgccaatgtaccaaacgatcatatattagtttccatataatgttaccagttatgtagcatcaagaaattatttcttttcataaatgcatacaactttcaagggattttagggaccaagagccaaattttatatagttataaataccaatagtgatgttgaatctattaaaaaggaaagttgacctataattgtaagtactagttagttataagaacaaataaaacaaaatagtcatattacactatttcttaattagatatttgtagtgatgataatacatgttttgttgtgtctaataactatgcattcattttcatatagttatacttttaattgccatgttaatttcaagagcatttagtaaaaatagcttgaatgataaaagaatgcaaaataatccaattatgtttatcttttctaagaaatactcaaactaaatacacagtaatccaatgcaccaatgcatagtttgtgttaagtgataaatctattttaacatcaatttagttctagaagctgattacattattaatgaaactatatcctgtgataaatattattacaactttcaaggataccaaatagtcaatgctgaaatgcatatatagttatagatgctatcagtaatgtcaaatctactaaaagtcttcccgtagtaataaatatgagaatgactacttttaagtagaaacaaaagaaaataaatctttctagtagccattgtattagtagaggatatccaaatatatatttctctaatacaaaacactataatacatcaagagtatccatatattacaagaatatatatctcttgcaataaatggccagattatgttagaagctatggaataaaaataagttccaactatatccataaccatcattcttaatagaaaatatctgcaaccattattgttaagaaaaaaactcaaagatactaaaatagttgaaatcattaagtggaacacatattgatgctttaaattttctataaataggtcagtagcaaagatctatggacacatttctcacatctagtttgaccaggcatggatcttaatctaagactcctattggcaatgcttgttcttgcaagccttctaatctacaccacaccgacccatcatgtcaattctgaaatttctaaccgtcagaaatatattgtgcgtgtgcgccctccaccaaacttttccccagatatgagctcttctaaccttgagacatggtatagatcattcctcccaccatcatcgatgggtgcatctaggcctcatacaccattcatctatacctatagagaagccattctcggctttgctgtgaacctcacgaaagttgaggtagagtacgttacaaaaagagatggtgtccttaatgtatacgaggattaccttataccactcttgacaacccatacacctgaattcctagggctaaggtccaatggaggagcttggaatagcataggaatgggtgagggaaccatcataggcttgctagatacagggatagacatgtcacacccctcattccatgatgatggaatgaagccaccaccagcaaagtggcgtgggtcttgtgactttggagatgccaaatgcaacaaaaagttgattggtggcagatcattttctagaggtcatgtgcctccagtggataatgttggccatggcacacacactgcaagcacagctgccggacaattcgtagaaggtgcaagtgtgcttggaaatggaaatggtaccgctgctggcatggccccacatgcacaccttgctatgtatcgagtgtgcagcgtatggggatgttggaactcagatgtagtggctggactagatgcagccatttctgatggtgttgacatactgtctatatcacttggtggtcggtcacgacgattccatcaagaattactggcaattggcacattttctgccatgcggaaagggatatttgtcagttgttctgcaggaaattcaggtccatcatctggcacactaagcaacgaggcaccttgggtcctgacggttggtgcaagtacaatggaccgacagatgaaagctattgtcaagctaggtgatggccgctcatttgtcggtgagtcagcctaccaaccatctaaccttgtttctttgccattagcgtacaagctagattctgggaatgttaaagggaaggttgttgcttgtgatcttgatggttctggtagctctggtatccgaattggaaaaactgtcaagcaagctggcggagctgggatgatagtgtttggaaaacaagtgagtgggcacaatacttttgctgaaccacatgtcctcccagcatcttatgtgaatcccatagatgctgctatgattagagagtatgctaagaactctagcaacaagccaacagcctcaattgtctacgagggaacatcattgggaactactccagctcctgtagttgctttcttctcttcacgtggtccaagcacagcaagccctggtgttcttaagcctgacatcattggaccaggagtgaatgtcattgcagcttggccattcaaagttggaccaccaacaagtgcaaattttgtgaagtttaattccatttctggaacatcaatgtctgcacctcacctcagtggaatcgcagctgttatcaagagtgttcatccagattggtcacctgcagcaatcaaatcggcaatcatgacaacagcctatgcagtagatggtaacaagaagccaatcctagatgaaaaattcaatccagctggtcatttcagtataggtgctggacatgttaacccttctcgagctatcaatccaggtctaatctatgacaccgatgaggagcaatatattttgtacctatgcggacttggctacacagattctgaagttgagatagttacacatcagaaggatgcctgtaggaaaggaaggaaaatcactgaagctgagctgaattatccttcgattgcggtgaatgcgaaacttggcaaacttgtggtgaataggacggtcaccaatgtaggcgaggcaagttcaacctacactgtggacattgatatgccgaagggagtaacggcatcaatttcaccaaacaagctagaatttaccaaggcaaaagaggtgaaaacatttgttgtgagtttaagttgggatgccaataaaattaagcatgcggagggaagcttcacttgggtgtttgggaaacaagttgtgaggagccccattgtaatattctaatgtaaacttagtgagtttaggacttgcttgcaagcctgctactaatattaaataataagtttatcaatattggtatctctgcaactattaatagagtttctgtagcttccatatcactaagaagctccatagaaattgtatccgtcaatctcaaaaaaaatatatatctgatttctttacatatgcctatattaattttttgtatctctccattgtcttctctcccctcttatttttctcacccgtctctctctccccccttgtttctggatgatacaagaggcaagcttggtgcggcgacggtggtgtgggcatggctggccgatctgggagtagacttgagcaccgcttggtttttgtccgccatggaccccaagagtgtcccatatttcatccctatctatttttttaggaaaaaagagaataaatcatttccaagagttctccatatcttttctctatcttttcgcacttggcaaaccaccgccacctgcgcgcaa

SEQ ID NO: 4845 - DNA, 14969 bp, Sorghum bicolor
ggataaaaagcttgtccgtgtcttgcgtcaccatcgagttcgtagtttgcgcaccgtctaccgataaactactaccgtgggtataccccaaggtagactgccgaccagctttcgtcgacattagttaaggacgttcggctgttcagataaaccaatctccgtgtgcgttacaactaactaaaaaaaatgcaatgcttaactaaagacgtccggccgtccggacagaccaatctccccacgcgttactgactaattaaaaaaaggtggcgtttagttaaaggtctgtccattggttagtgtacatgcggcatgtggagtctatacatgcgcgtgatcatatagagtggacaggctgccttctgggtttgctgttgactttgtatattttgcaatagttatacataggcctagttccctgaatgattttttctaaaaattgtaacattttcatttgtatttagtaattattattcaactatagattaactaagcttaaaagttttgtctcgtaaattataaacgaactatgtaattatttttttatatatatttaatgctctataccataataatcgatataatagggaatcttaaaaactttgtaaaattttcaactaaacagcccctcggagtgttggagctcgaaacacaactgccctgcgtgcaaatggaatgttgatgtacggaccacgggtgcagactgtggacagcttaccaaattcgcagattttttttgtattttagattatttttgaaaatattcacgtttcgatccctaggggttttaattttgttttctgatccagagggtacttattgttcaaccataaacaaactaggttcataagatttgtctcgcaaattaaaagcaaactatgtaattaattttttttatctatatttaatattttatatatacgtctaaatatttgatgtgataggtaatcttagaaaaaaatttaggaactaaataaggcctcataacgaaaaggaaaaagagagagaccaagaaagaagagaaaagagagaaaggagaaggccgtgtgggcctgtatgtccataccttagcatcaagatccatcggcctatttatttgagtttattagtcgaatctgccaactatttaaaaatatttttttttataataaattagccaacaatactttctgtcatggacaactcaacaatactttcttctatgtcattgagcctcccgtcgtgtcgacaacatgcaagcagccatgccttaagcgggctttggcgtcgtggatcacggtaccgaccccttggatctaaaaataattgaggcaccccgccacccagggatctaaacgtgaatatttttgaaaggaactaaaatacaaaaaaaaaaactgtaaattcggtaagctgtctgcggtctgcacccgtagtccgtaccgtacagcaacattccattccaacagcaacagaatccatacctgctcctttacagcgatgccactgccatgtacagacaaaaaagagtcaacacatcctgcagctgcaggcgcgcatctgtattatacccaagtcaacatgccggccctgccatttttgtatatatataggacaacagcaagtgcaggacgtcgcaaggagtagtaggaagagcagtgggggcgcgtgcgcagcgcattgtgatggatcatcaagcaggcggcggcgatggcgaggagcgccagcagcagcagcagcagcagcagctggatgatcgtgatgatgagcaagaccatgagcttgtggaggcgcagggcagccggaggaggtcgtcactaccgtcgctagagaccgacgacaagggatcagtagtgcagcagcagcagctactgttaccaccgtcgtcgtcgtcgtcgtcgtggcgggcggcagcggccagcttcagggagagcctgtcccgctccctctccttctccgtcaacgagcaggagaaggacgacgaggtggagctgagatgggcggccgtcgagaggctgcccaccatggacaggctccacacctcgctgcagcagctccaagtccaagtccaactccatgcagcggcggacaaggacgaggaccaggaccaggacggccagctgcaggctcctagtcctgcgccatggcaggcggtggacgtgcgcacgctgggtgcggcggagcggcgcgcggtggtggacaccctcgtcgccaacatccaccgggacaacctccggctgctccgcaagcagcgccagaggatggaccgcgtcggcgtccgcgcgcccacggtggaggtgcgctggcgcgacgtccaagtcgaggccgagtgccaggtggtgcacggcaagccgctccccaccctctggaacaccgtcgtctccaacctctcagtacgtttccttacgatctagagctctcttcatctctgttgcattgtcgacaccaacgggcaacagcggccctcgctggagatggtgatggtgacgatcaccctaactgcgcaccatgaactcacaaacacgcacgaagacaagtggatttggtgccacgaacaacttgcgacgttttctgactattgaatttatacaaaagattggacgtgattgacaccacgatctggtataaaaaaaattaatccccagcgataaatgcaaattttcagaaatatgaggtcagatttaaataaatttgaattaatcctaaaaaattggtatcactattaagagaatatagaagttttagtacaatggccaaccccagctagaatcttgctagctaattactagttgaaaaaacaactcagattcttcgcaccggcatgcacccatagatgggcaacgggccggcacgtgccggcccgatgagggtcgggctaacaaggcatgtcgtgccctgcaggccatgcctccctgggcttcgtgtctagccaacggcccaggcataatcttatgggttgtttttcgtctagggccagcctggaaaagcctaaactttttagcaggtcgggctagctgtggcccaccaagtgccagcagagagtgagagagaggggcgacaggggaaggggcgccgatgcttggggctgctctgctgaaaggtgtcacggtgaaggggggagcccgaagacgctgccgtcgcgctcgccccaaggcacttgacgttggatctagccatgggagatgacgacagtgccaatgagctcgcccctaggaggcgcttgatgctgcggatccaatcgatgaagtagccgaagggcagcggaggggatgacacgattcacgagggcgtggaggagggcggccatcggcgcattcgagaccactacagcgtggggaggggctgttggctgagcgactgcgtgtacgtgagggtagaggaagacagcacggcgcagagaagcgagtgtggcctacgtggcgctaatagagtttgggttggatctcggcatggcggcgtggggcatggggccctttacttttagcagaccaggccactagcgggccatgtgctatgcaccgagctgggccttgccaccccacgtgcctaggtgtggcctaggcatagactgctctctcgggccgtgctagcctgagcccactggctaccgagttatgccaaaaaaacaggcctcgtgctaggctaacgataacaggctcaggttgcatacccatatatacatgcacccatagcttggcctgatgtttgatcgttggtagcaattctggcacatgggtgactacgccgcggaagcaccttgcatagttgtgttcctctctctccacaactctcatgccaccaaggcgaagatagaattggccctgttttgtatgaactggccactgtgattggaaaagttttcaatccattgtgcgccacaaatttatataacaccgacgaaatataacatgatatatgacaaagtagatcaatggtaataccaaacttatataacacaaacgaaatataacacgatatatcacaaagtagatcaacggtaatatggtgggctgatagtagacgagctgtatatgctagtgattctgaatatgtgagtgaggaaattaaattattttgaaaaaacctagggctttagtaaggttagaggatatagagggtcattttcgagtggtttggtgtagttttgcaacggaaagatgaatttaagagaaaaaatgaacgcagcatgcgtctggctgtaacaagacgcgttcaagctggctaggattgagctcgccttattctaattaagctaagccgataactatgagctgagccaagctaggatataagtatcaacactctctgcgagttggtagctcgctctcctgcacatccgttacaatgcatccattgttccatatatggatcaggtggtgagcaccatgctgggcctcaacgaccgccagcaagcgagggtgcgcatcctccacggcgtcagcggcgtggtcaagccttccaggctgacgcttctgcttggaccccctggctgcggcaagaccaccctcctcaaggcgctcgcagggaagctcagcaccagcggcctcaaggtgacgggagaggtagagtacaatggcgtggagctgagtggcttcgttccggagaagacggcggcttacatcgatcagtacgaccttcatgtccctgagatgactgtcagagaaaccatcgacttctctgcaagattccagggcgttggcaacagagcaggtaattaatgtctctctccacatcaaattaactggtgatcaccactcactctcactacgtaccattgtatcttattttctcagagatcatgaaggaggtgattagaagggagaaggaggccgggattacccctgaccctgatgtcgacacctatatgaaggtaatacactagtaggttatcatgcatcgcttggcttataagaaatggctgaaaaacactgctgaatgactggcagaatcggcacatagactcaagatgtttttacaagtgtccacatgcatcatttttttatatagtttgtttattacttatgagtacagtcctctcctttttcattgtctagctctaacaagcaaatcatgcatgcatctgcacagattctacttcaatcctaacgggcattgttacatcttttttcataggcgatatctgtggaaggtttagaaaggagcatgcaaacagactacattatgaaggtactactacagacgtatagtaactgtcgcctgaggaaacatgcatgcatgcatgctcttggcccaccaccgtagtataacggtataagaataagctcttcctcaattgacagattatgggacttgacgtatgtgctgacataatggtgggagatgcaatgagaaggggtatttcaggcggtgagaagaggagacttaccacaggtgattcaacatatttggggaagatgtcgtcatcctaagaataatttttattttagcaaaaaaaaactaatattttaaaaaacatatcacagactaaattctggggaactagcctctttaatcgtgccaaatgtcatagcacgacttgattgggactgctccacaaactccaccgtagagcaactccacaaaaaactgaagtttgtggaatacctcttcaggtgctctcacaacttaccctttttcctcgaactgagtgcgtggagctgaaaccgtttggctaaaaaatatggagcagaacctgaaaaacgtggagcagagcagttccaaacaccctcatagtcacaccgtatgcattgatgcgtgactctaactagccacacgctggtgcatctagagaacactttgcacatgagcgactaacgtggaatgaaggtcagtcgcaccaaggcatttggcattagtgaacaattgagtcatgccaatgtgaatgacatgacacatatagttcagtcaacccagcactactggtgtgactacaatacagcccttacaatgatctgatttttcgtctgagtcagagtcatgagtcgagttgagccgagccaagttacgtctgggtgtttaaatagaaagtgaaatcgtcggaccccacatgtatcagtacaagtctatttagatttatttcaaatgcttttaaattttctttcaaattagaacttaattttgagcatgtactttgttaataaactttggatatttcatctaaacacatatgctggtaaattccattacaaaaaactactttccgaaccataaatttagatgttcttttggatttttggagtccattttgaggctaaataacttaacctaagactcaaatataacattactggaagattttgatttcaaaactaaaagtagtacgatgcaagatacaaataaaataggccacgcttatcttgtaacacctatttaaacatttgaaaacaaaacttaattccattaaaaaaactactttccgaaccataaatttagatgttcttctggatttttggagtccattttgaggctaaataacttaacctaagactcaaatataacattactggaagattttgatttcaaaactaaaagtagtgcgatgcaagatacaaataaaataggccacgcttatcttgtaacacctatttaaacgtttgaaaacaaaacttaaagatatataaatactttgttttagattgacaaaaaaaaaagaaatcaaaacgcgtacaagagctacgaaagctaatggatggaaatgtacggtcaagccaatggtgctggggtggggtgactgaactatgtcatgtcatccactttggctagactcagatcttgttaagttctaattttttttttgcaaaatgaatattgtagcaattttgtttgtatttgacacgctcaaaagatttatctcggcaaactgtataattagttattttttatctatatttaatgtttcatgcatatgccgcaagattcgatatgacagggaattaaaaaattttacaatttttttttggaactaaacaaggcctcagttgttcagttgtcacgccaaatgcctaggtgtcactcacctctcatgtgtaaagtattctctggacacatcagcatggctagttagtcatgccagtgcatatggcgtgactaaaatggctagtttctaaaaattcggtttgtgatgtgctctatttaaaatattagttttttgctaaaataaaaaaattcatcccaactataattttgtagagattgaattaaaatgctacaaatctataattctgatggaatgatatactccatgtcatttcttattctttttgagttcaatggatccaaccatatgcgttgcaaacatgatataacaatttttaagggccctcttgattcaatttcaaaatttcataggaaaaatgtaggatccaatgaaaaaaatcccacgtcctaaagggggcctaagaaggaaagatgtatgtgtatctgttgttggaccttaatatagacatgtaattgaacacaatcaggatcttaaacttagcctaagcatgatcactaacttattaatcaattgttgtttaagatattaaacatagataccattgtgcctttggaatcggtgtaggagttgacgtaggtgtagcataactgttctgttcactagcttagggatttgatgccctttgttggtaaagaacatgcaatgttgactagccttctggttgtagagattgtgcttctgagaacctccctccaatgtctaatcagttctaggtttaatattattagatttgtgacaagttccctctaatttatagcactgtgcgactagggccgatcctaaaaggacttagggttgccgctaatcgtcgcacaaacttaactaataattagacacccttttgtggactaattacttgtgtaccaagttaacatgttggttgtgtcgagatcacattccaacaatatctatttttatgtaattctaagcttagttggtcaagaggtaggtaaatttagttgattcaattttggatgcatgttcccttactaaagattctgccttacaggagaaatgatagtaggaccctcaaaagccctcttcatggatgaaatatcaactgggttggatagctccacaacatttcaaattgtttcttgcctccaacagttggctcatatctcagagtctaccatactagttgcacttcttcaaccagcaccagagacatatgagctttttgatgatgttatcttgatggctgaagggaaaattgtataccatggatctaagagtcgcattatgagtttctttgaatcatgtggattcaagtgccctgataggaaaggcgttgctgactttctccaagaggtaatacaaaattggttatgtaaaacaagcaaaaacaaaatttgtagtttctactacatttcttatatcattacttgttcgtaacacttgttggggcatgtcataatgcattaacaaaaatatgtctcccactactagtttagtatgtatcaagtactcccttagttccaaactatgtcattttttgactttttttggtacattcatttttctatgcgacttataattttagaatgaagggagtacatactaaactatatattagggtaatttattaacttcatcagaagctaagaattcttattttcccatacttatatataggtcttatcaaaaaaggaccaacaacaatattggagccacagtggagaaacatacaattttgttaccgttgaccaattctgtgacaagtttagagtgtctcaaattggtcagaacctggccggggagatttcaaagccttataataaatcaaatgggcataaaaatgccttgtcctatagtatctactcgctatccaagtgggaactcctcaaagcatgtttttcaagagagcttctcctcatgaaacggaatgcgttcctctacacaacaaaagttgtgcaggtaagtcacatagtaatggtcttttctagaaaatattattgaagtttagtattattgaacaatataaagactaatcacctaattttgtggttccatatgaaaacatgtagctaaatattaatgttcatatgaaaattacacatattatttgtagtttaatttggctataaccaaaaaaagtatggcatgtatctagaaaggggaatttctaggcttatctctcccacacactctctctctctcacgcgcacgcgcatacacacgtgtgcacacccagacacgtagacacacacgtgttcacgcacatgctcgtaggggtggacaacgagccaataacactttttttagtttttttcaaaatttacataatcttatttgtcgtagtctcctaaattgtttgagacttaactccaaaccaagcttcatgaactaagctaaagtcgaaagcaatttaaaatcaagacatttttaaaaggaaaacgactttaatctgagcacttttgaaacgagccagctcaacgagctttttgtccatgcacacgtgcacacatgcacgcgcacacacgcatgtgcacactctcacacacacactcaataagtgcaaaaaggtgattcgaacatgatcctccatgcaggtggagagattctaccacttaagcaagataaaccctctatagacaaaaaaaaccttataagtaatattgtgtaatatttctatgtatgaagaaacaaatatatttataaacttattttgctatgtggatgttgaaatcaaacctttgcacaagaaccaaaacatcaagttttataatttttaatcatgttttgcttcaaagcgagttactcctgtatatcatcaaccctcccaacaatcaagggatctcttttcaaggaacatggatattaagcgaagtaaaacttcatttaaaaaacatgatatgcggtcacatatgcgcacacaaacttagtatatggatttaaccacatctacagtacctagcttgttctgtgtactaagaattagatgttggaacatagataaatttaaattgagcccccattgcaaaaaaaaaaaaagatagcccattgagaacctgtacacaatcttaatatcctatgcacttcctacacaattttacatttaagaatttacattatcttttgcttatatgaatgaacttaactacatttacgtgaaaagtatatcttacaattgacatgaactaaaaaacaattttacatttgtcttagtgtgacaactagcaattaataatgcactattactgcagcttggactacttgctactattactgggacgatatttttgcgcacacatatgggaattgatagagttcttgctaaccattacatgggttcactcttctatgcactcctcatgttgatggtgaatggattccctgagatttccatggcagttaacagacttttagtcttctacaaacaaagagactactacttctatcctgcatgggcttatgcagtaccagcttttatcctaagggttcctatctctttagttgtgtcaatagtttggacatcactatcttacttcctcattggctatgctcctgaggcatctaggtaggaattacgattttgttatgactaatttaatcacatcacatttttgttgtcaactttggtaataatgcttttgtgtgtcagcatgttttatgtgcataggattttctaataaagaggtaaaccaggcatctcatgtatatgcgcactttcctagtagtctagccaaaagatgtgtggctagactctttaactaattttttagtgacctcatctcttgaggtcagttatatgtataagtttgccttaggccttatctagctctaggtttctaaggttcagttactgctattgctaaaaaagaatacattcatatatagctttatatgttctcacacacaccatttgtatgtataggttcttacgtcaccttcttgtactcttcctaatccacaccggagcattatcaatgtttagatgtgtcgcctcttactaccaaacaatggtagctagtgtagtgggtggtacaatgttacttctactcatccttctgtttgggggtttcctcattcctcatcgtaagacattcccatgctttcatgaattcatcattcaagcatgatattcgattactaaacacaaattgctaacacatttttgtattgaatttttacagcatccatgcctaactggttgaaatggggattttggctttctccattatcgtacgctcagatagggttaactgtaactgagttcttagcaccaagatggctaaaggtaaactttgacataaagatatgtattaataattgtgcactccataataaaatcatgcccttgatctttagaagcatgatgtattttcttatgcaatatctgtagttttcagttttaccttgttagcagaacttgtaagcaaggtatacatgtggaattagtaacttgattccgggagtacatggtacatgtttatacaggaaagatatcctagggttggcttatataattataaacaatcatagagatcctttatctaaaattagtctacactttcatagtaggggagtgcaaagacacggtgttaggtgggtcaacagccatggagatgttggcaacagctagggttcaggcaaagttgtgtgattgaggatcaactagcttgaaaccatgtgaggtatacaaacaaagatatcctagtattagcttatagaattagaagcagttatagagatcattgcctatctcaattcaatatcagatctgcgccagactctagctccatgctagcatggactgtgtacatttgataacctaagtcccaattttttaggccatatctgtgaagttataaatcgaacttatttcccctttaaattcattattgtgaacacaatgcaaaatgtataacaaaaactatgtaatttgcaatttttcatcactgagatagtactaacttttttcattgttgatagttcacaggatctggtgtgacacttggaaggaggacattaatggacagagggttgaacttctctagctatttctactggatttcagttggagcattgattgggtttattttgttatttaatataggttttgctattgggttgactattaaaaagcgtaagtgcattattcttgaaattttctttgaattctttaccaacttataattctcagatatgatttgtaaagtaaatttctctaacatctcatgtacctcattctcagctctaggaacttctaaagctattatttctcatgataagcttaccaaaattaatagaagagaccagagtatgtctatgggcaccaaagatgggataaataagctggaagaaaattcgtctacacctaggactggttagtcttaattctacaatgtggaaccaaacatagttcagattgttagtgaaatggaactcaccttcaataataaaatttgcaggaagggtggtattgcctttcatgccccttgcgatatcatttcaggatgtgaactactatgtggacacacctgtggtaattaccatactctaaaatgtcaatatatagttactctattcaaagaaagccatgcttgatagaccatcatatgggcatggcagacacttgtgattctcagtgaagtaaacataaagagaaaaaatgaaacttactagcaaaaaaggaattatgaacatttgttgaccaatacaaaatgtctattattgcaggaaatgaagcagcaaggttacatggagagaaaacttcaactactccacaacatcacaggagtcttccaaccaggagtcctttcagcaatcatgggagttactggggcagggaaaaccaccttgcttgatgttcttgctgggaggaaaactggtggtgtcattgaaggagatataagagtaggaggtcatccaaaagttcaacaaacttttgctaggatatctggttattgtgaacaaactgatattcactccccacaaatcacagtgggagagtcaattgcatattcagcctggttgcgccttccaacagaaattgactccaaaacacgagacgtaagttatacttgatgatatgtcatagataattgtacttcaattataagaaattacaaagaactacaaggtaactggtattattttctcttgcaggaatttgttgatcaagttcttgaaacaattgagttggataaaataagagatgctttggttggaatacctgggataaatggattatctacagagcagcgaaagcgtctcacaattgcagttgagcttgtatccaatccttcaatcatattcatggatgagccaacatcaggcttagatgcaagggcggctgctattgtcatgcgtgcagtgaagaacgtggcagacacaggtcgaacagttgtgtgcactattcaccaaccaagtatcgaaatttttgaggcatttgatgaggtaataccatttatgtaccctttgtcaagaattagaaaagagctaaatacaaaataatttaaagaataccttccaaagttttgtcttccaagaacaaatccatgcaagctcaaatggaattcccaatccctagaaactaaggtttatccaaatattaattatctactaaagaaccaaaaactgcattcaatacaaaactttcttcaaccttcttattgtctaagtgtttgagatgttattaaatttaatcctattatttgcaaataaaaatagttatttaatctaatttcttgatatggtttcttttaaaccatgtcatatattgctaattagcctataaaattcatatttagctgatgctgatgaaaaggggtggacagttgatctatgctgggccacttggtcaccgttcgtgtatgctcctccaatatttccaggtaattaaaacaaagctcaatttgtgtgtatacatgtatagtttatattatgacttaaattaatgtaagccatcttacatcgcatgcaaaataggcttcaaaatggtctccatttattttgaatatttccaaatatattgtgtttttttacttgtagagtcctcatgatttccattatacataacacatggagtagactttctatattcatgaaagacgtaaagagtaaagtgaacaaactagctacatccctaaactttgaattgtggtttcaaatcccctaagctttgagtggttcgcctatagggtccaaaactatccggtcaatagctactctctctctcacttgtcctaattgatctgtggcattgtgaaaagtaaaagaatcactattataatctactcgttgtaaactacattcagttttagttaaaaatgacaatgatctatatttatcgttgagtggaatgtgttccataggctaatacttgtggaagtattccctctatttctttctaggcaatacctggggtacccaagatcaaggacaactacaacccatcaacatggatgttggaagtaacatcaacatctttggaagctcaactaggagttgattttgcacaagtttacaaggactcatcaatgcacaagtaagctttgaaaaatcatcacaattagttaaaaaccatgttgtgtcactaacaaacattttagtatcatcattacaaaatacaatatgaaaagcatgtttagaggcattctgcatccacaatacttaacaaaataaaactcatggatcacaaaagcaattttattaggaaggaactattttgcatgggtcctctcttatttcttaggaactaaattttgcaaaggatttgtactaataataagctattggggattgaagggataaagatgaactcgtaagacacttgagcataccaccttcgggtacaagcaacctccatttcccaacacggtatccacaaaagttttgggagcagttcaaagcttgcatttggaagcaatgtttatcatattggagaaccccttcctacaacttggtgaggattgtgttcataacagtcactagcattaccttcggggcattatactggcagcaaggaaacataaaccgcatgtatgtaaat

SEQ ID NO: 4846 - DNA, 8553 bp, Sorghum bicolor
cagcatcctcatccgcggcgtctaggatcgagcgcctaaccctgccatccccgtcctcggccgcggcgcccctctgccccgttcacctccggttgcggacgcaagctcctcggcggtgcagaggaagaagaaatgacagttacagatggatctcactggattggaggagatgtaactctcgagaagagatgggttgttttcggtggccacaaaaaaggccatattagggagatcttatctcctactccctccgtcccaaattacaagtcattccaagaatcttggagagtcaaagtttttcaagtttgaccaaatttatatagcaaaataataatatttttggtaccaaccaagtatcattagattctttgttagttatatttttatagtgtacctattttatgacataaatctttatatttctctctatatttttggtcaaacttaaaaatgctttgactctccaagattcttggaatgacttataatttggaacggagggagtactataatagttttatggtgattggagtcctattagggaagtgctgtaaagactcttagattggtggtctccccaaatccttgtgcacttatcttgggatgagttaggccttgtttagatgaaaaagtttttggattttgacactgtagcattttcgtttttatttgacaaacattgtctaattatggagtaactaggcttaaaagattcgtctcgtgatttacagataaactgtgcaattagttattctttttatctatatttaatacttcatgcatgtgccgcaagattcgatgtgacggggaatcttgtaaagttttaggtttttgggtgtatctaaacaaggccttacatgatgtttgtttgacttctctctcactttttttttggaagaagtccactttaggtctctcaactttcgcaaaagtctgtttttcatccctgaacttcaaaaccgggtaaaatacatccctcaatttttgaaaccatgcatattacgtccctgacatgttatgagcggttttgaaggcagttttgtctttttttatttttatttattttggctgaatatttgtaaaattatagtaaatcacataaaattcataaaatattaaatctgattttgttggactccaaataagtagatctacatagtgaacgtataatatagtacactttagtacaaattttttattgtagctttagatctgtgtttttctataattaattagaataattcatagctatagtttgtatggtacacttgtggtgaattttttatgttggaataattattatatgtttaaactatggtaaaaatttcatactcattaggtcttgtataacttagttatagatttattataatttaacaagcataaacctaaataaatctataactaagtaatacgtgattcagtgagtatacaatttgtactataactcaaacatagaataattagctcactatataaatttcatcacaattggaccatagaaaatgtagctataattagtctaattaattacagaaaaacatagatctaaagatgcatcaaaaaattttgtactagaatatactatattatatattcaatgtgtagatctactgatttgaagtccaacaaaattgagttttttattttatgatttttatgtgatttactgttatttttaaaaaaattcagccaaaataaataaaaagaaaaaggtaaaaccgctttcaaaaccaggtcaaggatgtaatgtgcacagtttaaaagttgaaggatgtgttttattcggttttaaagtttagggatgaaaatcagacttttgcgaaagttgagggacttaaagtagactttttccttttttttttttagatgacctctcccacatgaacacagcctaccatcatcatttctatgtcactgggccttttcaatcaacgctcaatttagccggcccggcccataatcccttgtaagagaggcttttgctaggtttttgccccaaccgcccgcccaggttcgtgcttctgcccacccacccctccactcccggcgggcggcggctgcctcgccgaagcggtccagccggcgcgcccgagatggcgaagggcgacgacgcgctggcgcggaagcgcaaccgggtgcgccgcaagcgcctccgcagcagcgagaacgctgtctccgcgcgggtcgcggcaatcatcgcctccaagcgccgccgcaagtcggggaagcgccgcggctgcgagggcatgtgcttctcgctccctacgcccgacgacccattcaacgagcgccacggcaagaagcgcaaggtcgatgacgagccgaccgaggacacagccgccgccaaggacggcgacgaccccaagaagaagggcgcgaacaccaaaaaggagcagccggtggcaaaggccggcgccgaggccaaggccaaggccaaggccaagtcgaaggcagttcgcgagagggcgacgggagcggatgagggccgcgtggacttggaccggccctccaagttcctggtggtctgcctcaacgccatccgggacacgctggcgcccgaggacggcggcggcagcattcacggcgccggcgactggggcgtggagctctggcggtgctgctccgcccaggcgccgtccgacgtgctcgacgctagcggcgcgtgcgccacggtggaccagaccgcgtggctcgtctccaccgcctgcgacatcgtcgctaggaaggagaggcttgggatggtcgtgtcctgccccttcctgctgtacctcgtcccgtcccaggagaaggccgcgcaggtttgtcctcacattttaatgctcctattacctagtatttctttgtatgaggtttaatgaacaaattggaatgatttgttgattctcttggtgttgtttgggcaggtgcgatcgatatgcaaacccctgaagcctcttgggattcattcagtgagcttgcatcctggcgcatccattgaacaccagatttctgggtatgttttgttccattatttgcatcatccgctgttgattgtaaatgtgatacatgctatgtattagcatagtcatgtactgtttataatgaatatactaaatgacagccgatttattagtgttaattcattttgtttcgactgctctatcagactgaaaacttgtgagccggagtttcttatagctacccctgagaggcttcttgaacttgtttcgttaaaggcgattgacatatcaagtgtatcaatgctggtgagtaaatgtggcaattggagtgagagccttgatgaactatatcaatgtgattgtaactatgaatctggtgttctatgtaactgcacattgcaaactatgaattttgcaacaagttattcatcatggctcttagcatgcttagtcattctgttttctatattgcttttctccatatagttaccaatcctactaccgaatttcagctaaagatgacaacttcaattgacaggtcattgatggactgaaatgtttcgtggaccacaatgccagtgacaaaatattttctattagagacgccatatcaaacaatcctcagattactatcttcaccgatccatctgataaaaaggttgcagcaatggctaaaagcctactccgtggaagaattacaaagctttctatcaatgattctgtttcttcacgaagtgcatttatagcccagcatgtacacttctgtccatcagaggagctgaaaacatcaaaggtaattacttcttatttctctaatgcctatgttcctgatggtacctttcatggtttggttgtgtttcaagtgttgtgcaacttactcatgataacaataatgcatagctactaagctactgcaatttctacagaacttccagtcttagttacacttaatgtgtttccttcttactggacatctaaaagacttcattgttttcctgtatactggaaatctttgtttttaggatgtcgtgctcatacctcaaacagtagtagatttgctttgatattgattgtctgaacaaacatttggatcctgcttgctagttagtagcttactcttacacctatcaggatcacaatccgaatcatagaatctcatgatccagtgttaaacgcaattaaatgctcgcctaggcattcttaaacgtgaaacggagccctggtgcctcgcctaggccataggcatccaattaaatgttgactgatgggtaagtggcatgaaaccagaggaaatcaggaggaaggcaaggtagcgcatgaataggcgagcagcaggaacatgcatgaatctcgagcaccaactcctgaagtggccgccggagtagcacagcaccccccggcacaactccctggtgcttgcagaccttgtggctgtgcggccagagaccttgcagtttgtgaaatgcggatagctgtgcggcggatgtgcccctgggagggagacaggaggggaatagaataggagtggataaggttggggtgtagtttttttttttaaatgggtctaggcctcttaacatcttttctgctctgccttgtttggcctgttgttgcaacaaggatagactgaatctgtgatgcagtgatacacttaatacacatcccggcaacaaaaaagagaaaaagcgcaaacgcttaatcatgtttaatctctgcttaggcatcacaggcgctaatcagtagcctgctgccttgcaccttttgtaaccttgctatatgatcctagttctggcaaacaatctgagtcgcagcagggatcgtttttaggtggagtcaccatgagatcgtagaatcaggatacagatgtgattttatactgtccatactgagggagagagggagtctatttgctgcattgtctctgaatagcgttcagaatttttgcgaaattcggttttaccggtcaggcaatgtaaaaggctatactgttttctaaatttcggtctgtttttttttggcccaatagagtacacaactacacatggcccatgtatccattccggattacatacagacctacttgaaaccctagccaatgggaattatatttctctcttctcctcggaacctcagccaccgctagcctttgctctttttctctgctcctggcctgctgctcgtttgctccatggcacctgtggtttccctccacggcgtgtctccagctgtgcaaggtcagtgtcttgtagtgtagcactgtagcatcacatttgccttctgagtctcgatctgattggagttcagccatgagaagagctgatgtgccggtgcaactggagacatctcgccgtggatggcactgcagaaggttgatttgtttcaacaactctgtttttcttggactgttgaagtcagtgacgggcccaggaatttcctagagcctgggcgaacataacaatggataactagttcacatagacatatttagcactggtataagccaagtttacagccatgatagttttgaaactaaaatcaccattgagcattacacatacgaatatgcaaatattaaagcctcgtttgttgtagctctgaatgccttgggcttcttgttatagaagtagacggagccagtgaagctaaaagttatgtcttcattgactcctgttcatttttagaagaaagataaaaatgattacttgctacagtgttcaaaggaggcagagcagagccattcagaccaaaaaccagtaaggaaaaagagatgtcaccaattgtctaaataatatatatgacaataaagattaactgtacattaacaaatttcaatatacgtgcaccagctatatttttaaacctttaagttctgatgagaccgtcgatgagtggtaatttgactattgtgtgaaaatggaaagtcaattatgaattaatatacgtggtagccggtagctagtactatctgctgcttgtctattgctccatgaggcatgagaaccatgaatcaagtgattgattttggtaatgttgcctttcactgtgtcatgtggtcaccaaggagagctcgggcaggtgcccagggtccccgggccctgggtccgcccatggttgaagtggactattagactgtatatctgtatgcaactatagagtatcatttgccatctagatttggagtatatcgatggtagtttgagttgaggaatttccagtgtactggctattgagtacttgatgttgactgtgattttataaacaaaaaggtgtggtttggtctattaattccggatgatttccgctgatttcgttcaaaaagttctgtcgttttgttcaaatttcagacagatttcggtattcaccaaagttagtttgggcattttttgaaccgagaaaatctgaaaatctctgaaattcacgaaatttgtttctactgttgggcaccgtcttccccccatcaaatagtatcctcaaccctgttgaacagctcacatgctcccttcctttcccttctcattgatctgacccatactcttatctcctttctactcctaacaatcagcagcttctgcagaatagaaaaagattcatgaaatcgtgatagagctcagtagcctgggtatcagcagtgactccactgcacgctgcattggcataatgattggccgtatggttttactactgtatattttagcttagtcttgagggatgcattttgtaattttgtttgttcatcttgcacttggggataaggggcaaaagtcaaccaatggaaacagtagagtaatgctgcttatcactagtgatgtcagtgattctcttgttggattgcgagtttgcatcttcagtgaatgttgaaatccagacaatacttggattcagaaccatgtgtttgcatgtataattgtgcaagtttgaatggaactccacagtttgtacctccagaaatatctctatttgcatcctaatattataattaccatattatctgatggatctgctataaataaattgaagtagatgtatgctttatcatataaaaatacattaaacttaaaaaacgaaaatcccacaggatcctgatcctgcagtacgaccctacttggcaaaatcgatcctaccttgaatcccgatcctaagaaacttaatcatgtctgtattgaattcatggctgatagtttatttagcaggagttgttcaagcttgtatgattggggtgtgttgtggctttgatgttctgatgaagtatttctactttcaggtcaaggaaattcttgaggggatattgcaaagtcatcctaaaaagacatcgaaggttcttctagtagtcgcaaacgatcaaaaagcgcgatacatgtcatcgtcacttaagctgaaaaattgcacagtgattgatgattcacatggcagctcttttacgatatgcagcaggtaaagtgaattaaacaacattgtagtttttctgcagtttccattctctgcatgcagactgaaatgctgtgagaagaactttgggtttcagtcctaaagtagttttaatcaccacattattatcttttgactgagtactgtgtaactcatccttaatgttgacattgtaaatgcatttatatttgtgcagtttggggctgatgaatgtcattgtgaaagatcgggagaacatggcagtgacagatgcagaggaatttgaaacagtgctggtggtggatctgcctccttcagtcgacgaatatgttgagatcctcactggggttgctcttcatgtgattggaggcgaagtgcatagtatattctgtaacgctgatgcgtctattgcaaaacctctggcggagcttcttgcagattgccgtcaggtggtgcctgagtttttcaaaaacctggagtcttcatagcagacttgtgtacacaatcagaatagtcagatcatatcgtggtgcggttgtggcacttaactgtcaccaatcaattttgttattttttgtgttgggttctacatgtaattctcatttgtcagccaacattggtattcaggcctcgaccttgatatgtgtactaatgtactattatctcatacattgtgaaatgtgaatgccctgaagccctttacctggaagaactggaagtgccgcatgttcataagacggcggcctctattattgtcaattttgtcaaaggaactgtgtcagttatcagggacctcctttgcctccagctccctttgtccagggaacccccagcttcctttgtccaaaggcaaagctgaaaggagtcctacactgatagatcttgggacctttacagcgcatcaatcgaaatgtcaaagacagcttcttttgatcaagttcttttcacatctttacagtactgctcatcttgctagctcatctctgtgagctgtgcaccggccagcagcctttgccatgccggcctggtcctgaaagcttggtcagagagggattgctggatgctcatgggtagatcaccggtggcagatctacgcggccgggaccaggaccatgctgtgcagcaagcagatggcacgtcggtccagggaggaaacaaagttctgttacacgtatacgtgactatagctcgacaacgatgtatcctt

SEQ ID NO: 4847 - DNA, 6922 bp, Sorghum bicolor
ttgtataatcttgtatcaaaattgccaaattgatgatctaaaaataggtatgaaaacacatatataaaaaaaaataggggtaaaaatacatgagcaaagttgtcctttggtctaaaagttaacattgttaggtatacttcacagagtaggggtaaagtttctttgaaatcgcagaggtaaaatcacaaagttaaaaaaacaagggcaaaatcaccatttcgcttgaaaactgggtgaaaatgctctaacttcaccactaatcataaccaagtattcttcattactgtagtagtagcactcggtgccatatcttttcgctcctgagtctttgactacccaccaaccgctctactatgagctagtactacggtaggatacggcagaatgttgtttcagcttgattgacacgcatgtgtattgccttggcaaggattaaatgcatgaagacttaaattatattagctggcacctaattagccaaataattgggcatacctacagttcaatgattcatcagctcttgttggctgtaccttaggtcttaaattcctccagatatatatgctagtagttctgagttttgaaacctgaatgaaaccaagacctcctgttgtgacttgtgagtccaacaatactgactactgagctacagtttaatgattcatcagctcttgttagctgtaccttaggtcttaaattcctccagatatatatgctactagttctgagttctgaaacctgaatgaaaccaagacctcctgttgtgacttgtgacttgtgagcccaatactgactactgagaaaaaagagcacatgcacatcacgtgatcagcagaggaatcctatatactggagtctggagcatatatattccaattcatttctcctgcaatgcttgtctctgacatctgaagaagtgtggaatggcatggcatgtgacatctttctccttgtacaaaccacaaataatggataatggtctagatgaaaaacagcaaaaaaaaatgcatttccagctttatggagtactatagtactccctcaatcccaaattgtaagtcattccaagaatcttggagagtcaaagtattttcacgtttgaacaaaattatagagtgaaatactaagatttgtaacgtaaagtgagtatactaggaaaatataattaaagaagaatctaatgatatttagttggtatcataataattattattttatcatataaatttggtcaaatttagaaaagtttgactcttcaagatttttggaatgacttacaatttgggattgagggagtagtaattaagttgatgagccgctgggacaaaaaggtttctgccggtatagtacagcgttccacatggtacacaactttgaggacatgtcaattaacagacggcagtaaaggtttttggtacaaattgaaacatgatgatggagccggtatttgattactcttatcagccatttttctctgtacctttaaccttctgtccgattgtccctagcagccaaattggaccttttcattagctgaaccaaactacgactttttatttgccatataggagtatgatgcaaatggaccgtacagtgaataccttccgcttcacagttttgacaccatttggaagagagaaagctcatttggttgttttttagtccttagtttgaagtttgagcacaaattttcttcttgataggagtagaaatatttatgcctctttttcactttattatatataataacaattctgtactccaaaactttttgtaactaaaaatggaggtggttataaggaaaaggcagaagctggaaacctgtagggtccaaaaggagacaagaacacctaacagcagttaaatcactcaagtactctgaaagccatgatatgttttacagttattaatccatcacataaacttccggtgacgtaggcaattcgagacagttacaaaaggctagactttttctcctagcctgagatgatgggtggtagcttaaatagtgaagaaaacgcacgcgtgaacgagaagcgaggaggagagcatgcgcatgagctcggatccatgtgtccataaagggcaaggagaggagtaggagcaggagacgaatgatggtgccatcagctccagctcaagcccctcccttcaatccaactccacctccacaaaaatcctatccattctccaccaaacgcccccacgaggagagttcatcatctccggctagaaattgcgtctttttccgcctaaagattcgtcactggagttaaaaaaaattcccccttttgttgtccagttctcgacgcgccaattgtttttttttttcttttttgttgcgatttgggttcgtggatttggaccacgcgcaccaccacaaccaatcctcctctctcccctctccttccagtcccatcctgccccaacaatcccaatctccggaagaaagcaagcatcaagaaatcctaaataggggcgcaccaagaactccactgagaatccccaatcatttcttggtgcatttggccccccctccaggcctccaccatcatcgaaattcccaagaaaactcatcctgaatcggtcggtcctacaccgcaccagatcacagctcataattccagtgagaattcgaaaaggaggaagcaatgacggaggtggcgctcctccggggcccgaccaacctcgcttccaccgcaagccgcgcctccgccgcctcctcctcctcctcctccgcagcgctgcgctatttagccaatgccgacagcgacgtgctcccaggaagcggcagcccggagcgcgcagccggatctgcagggagccgacgactccttgaactgcgcgggcaagaggcggcggaggaggaagaggagcggtggtcgttcttggcgctgctctttgaactgctgcggaagtcgctgctcgggtgcagaacggtgagcggcggcagcggcgaaggcgaacacggcggctgcgggatggagattgggttgcccacggacgtgcagcacgtggcgcacgtcacgttcgataggttccatggattcctggggctgcccgttgaattcgagcctgaagtgccccgccgtgctcccagtgcgaggtatgtctcttgttccctcatcaaaattggcattgagttcacgcttccagaaatctgattttcttttcggaatttacttatgcaataacatggaactttttctttagctccaatttgaattttagcttggagggtgtctgcactcttttttttttccttgtcttaattccaaatatatgtggtgctttggtttgaacagatgcagacaacaagtattagattctgttgtgttcgaaagttgtaaaatgggaaatgatgtttgcttgatacgggggtggttaatagttgcattttgatggcatggttgtttcagtgctatagttttcatccttgaaaagatggtcccttttgtttgtgctacagcctccatgctgctttgatctaaaatattattgaaaaagcaaaattttaactgaaattttgaattctatttgaatcatggtataaagtatgaacttggatttcgcgttggcagccttagcagattttgaactatgctttggacttggatatgctttggaccacaactgtgcatagaaataatttctgcattttttttcccatgttccatcaaataattggtcaatcatttttctgatgcactcttaagcttccatcattttgctgtacttgcttacctcatctaagaattatttcgattcaactaggtacataaagttgattgttacatcatctgtcattagtaagattgaaaagttgccagggattccatgatttatgtatggcctattttgtcttgattagattattcactattcttttcactagacttgcaaattgctttggtttttaacttttgttatccttcatctattgttcgtatagtagaccttggcttcaaatacttggtatattattttttttttgtgctttgctatactatctgacttattataggaacagggcacaaagtataagaaaagtacatatgtgtcttgtatcttgtttcttattgggagttccaagatgtcggttttcagcattaggctaaagaatatacaaattggttctatatcagttccgctttatagaaggatgggagcctgtgctccaaaagaagataaagtggcacgaacacctaacatctaatcttcaaactcaaggattgctagtatatgatcaataaaaatcacttgataattggagatattgttggtaccataaatttacaatttgattctttaaaagatgatttgacatcaaggatggtagtctcgtgttcatgtgggcatatccttaaccttgcaagtcacatctattttgctcatttttcagtgctaatatgcattttctgaaaacataaattgttactaccattaagttcactttgattaatcttgttcattggctgattaaaacgtgatatgcagtgcaagtgtcttcggtgtttcaacagaatcaatgcagtgttcctatgattccagaggaaacagtgtcccaacaatcctcttgatgatgcagagacgcctttatgaacagggtggtcttcaggtgtgtttttatgggtaaactatgattcttagtctgttgccctcagtgtttggaacctttgttctgatcaaataagtgttttccttattttgtcctttcaggcagaaggtatcttccgtataaatgcagagaatagccaggaggagtttgtgagagaccaattaaatagtggaattgttccagatggcattgatgtccactgtttggcaggtctaataaaagtaagctaatttctttcatgtagcttatacaatcataatcattctattggcagcatctgtatcttaatcacctgcttagtaatcagatagttatgaaagatcgtgcttacctttactggtggaatttcattccaacgcctaccagagaatccagacttaactttcttgaccatctctttttcttgcacaatgatattgcctcaaaacctttttttcccaatgcatacaaagttgtaactatggatctgtgatcttgcttttggagaagtcaaggagtttggtcaacttatttgagattaactgtttatgctcatgagctagtcatgtttactccgcaagacataagtatgttctcatccaatttaatttttcatctcttttcaggcctggtttagagaaatgccaaggggggtactggactctatcccacctgaacaggtgatgcaatgccaatctgaagaggactgtgctcgggtagcaaaatgccttccaccagctgaagcagctttgcttgactgggctgttaatctgatggctgatgtagtccaagaagaacagataaacaagatgaatgatcgaaatattgctatggtttttgcaccaaatatgactcaggtattgcattgtgttaatctcatagcaattaacaaactagcaatatacctcaccccgagtaatgaaatggttaggcatgctaactgtaccacacttacaatgcagatggcagatcctttgactgcactgatgtatgcagtccaagtgatgaattttctcaagatgcttgtacagaagaccctcaaggatagagtggagtccactccagaggatgttttgctaccccagaaggacccatctgatgaaaatgggcatcagaaacccagcgtgacacttgattctctccttgaggaaggatccaggcgcccttcttttgccaaggaagagccccttctgagcagtcctgcccacagcactgatgataagtctaatgaaactaatacgactttaggagtcactgctgctttcactgcccagacaagtgaagtagtaacgagtgtggaggactccactagtggctcacaacctgcaactgctggcccagttgctattgctgatgcttcgggcgcgacggctacaaattctcttcaaggcaagggaagccgaagcctgaatcggaggaggactagaaagggcaagggccagagccagtctggtacacgcacaacacctgcagctgaaaaatcaagaggtgcgagcatcgtgagccggataaactccaaggttgagcggatcgaagcatggagatgaaatcaaaagccatttccattgttgttgtgtactagatgactgacccagtgtttcctgaaaatagcaccccgaactgcttgcacattttgcattttctatgcgcttatcattccttactgtatcatggtcattgtgttgtgagatttgagcttcttgtctttactaacttgtgtatctttcttatggttacatctgtgagtcaatgaaagatgctggtgctttcctttgtacattaatcttttttatgcctaatttatcaagtgcctaaaagttcaggtatgattggtgttgttgtgctggccttactgcttgtgcctcgtgcttgtttccccttcatgaatatggaatcccagtctaattgtccattttcatgtcgcgctgttgtttgatcctttggaatggttgttcttttgttgtactgtagagcatgtgtttcttcttttttaatatataatcgaactcctctgtcctctcattcatttttttaaaaaaaactttacttagcaccgctgcacttacttagcaccgctgcacttaaatagttgaaagcactatttgctgatttatcgtaagagaatgtctgaaaagcccttgtgtggaagcttaatggccatgcactggatgactcaaatacacgtaggagatttgtgtatcatcattatattaagaagcaactagatacacaattgtactttagtcgttctcaaatagttttgtacataaacacaaaacgtttccggtctgattaggggcagacatattggttcgctgaccatac

SEQ ID NO: 4848 - DNA, 12180 bp, Sorghum bicolor
atttaagaacatagatgtaagttttcctctctctattttcactaaaagcttgtaaaatagtactattcaagtattactattgtttgtccctcatattttttcactttactataaaagctactcaacacacacttctttggtagaaaacaatagtccacaaaaatttagtagttgtactcaattttataaggagcaatttcataaggagcattttttccagagtttggccaattaatctgccagctgatcttcagtagttgtattcaattttgtaacgagcaatttcataaaaaatgtttttttttctagagtccaaccaattaatcttccagacgatttctgatctactccctccatacaaaattataggcttttccaaaaatcttggagagtcaaaacattttaagtttgaacaatattatagaaagaattataaagatttataagatcaagtggatatactatgaaaatataatcaataaagaacctaataatacttagttggtatcataaatattattattctgttatataaatttggtcaaacttaagatgctttgactttccaagattcttgggatgacttataatttgaattggagtgagcaattctttttttacagacctatcattaaaagtataagagcatcttcaaccgtttggcaaaatttgtttctcaaagtttattgtttgccaactccgaaaataatatgggaggaaaaaaatctcatctccaacaacccgctaacgaaacaaagacgcccactaagcgaataaagagccccattaagcataaggagaaagaccaatgccaagcatggagcccgcgcacgtatttgcgcgctagacagggagatatgccaagttagagcatctcaaccgtttggcaaataggcttcacattcatatatttacaaaaaatctaaaaaacacatatcccacgatttaacaattgggcttttgcaattttgttaacttggcaaatagagggaaagaactccatcgtgtcactcgcgcgaaatccgtcgcccccgcgcgtggtcgcgccactactctctcctcccgccgctagattttcttttttgccaagtaattaatgccaaatcattgaagattgtctcttttcacctttctcatatttatttgggacttggcaaattctcttatttgtcaaacgaattatgcaactccaactggttgacaaaatttatttctcaacctcttgttatttgccaactcctaacataatataatatggagaggaaaaaacgatctcatctccaatagcgtggcaaattttgtttcaaaaatcccgaaacccgctaacgaaacgaagagtcccactaagcgaattaaaagtcccgctaaacgaacgaagagccctgctaagcatgagaagaaagactgatgctaaacacggagcctgcacatatatttgcgcgctagacgggaaaatatgccaaattagaaaaataggaattgagatgctaaactgttggagagagtttttcctcattttgctaaaaaaattgtagatagaaagtcatttaccaaactgttgaagatactcttagaaaagatgtggaattaaaatgtcaatctgttgaagagagtatttctctactttggtaaaaaaattataaatagaaagtcatttgctaaactattggagatgctctaatacgttaaatttagaaaaatatgagcacctaaatttaagtccaccggtaattgtttagatgcgaaatttttttgatttcgctactatagcactttcgtttgtttgtgataaatattatctaatcatagactaattagagtcaaaagattcgtctcgcgataactgataaactatgtaattattagtttttgtttttgtctatatttaatacttcatgtatgtactgcaagatttgatgtgacaggaaattttgattttttttgtttttttgggtgaactaaaccaggcgaggcgaagagtcatgcagaagcaaatagaaaccgtataggctcgaggctcgacccttggcccgccgccagaactcgtctcgcccgcggccgatcgtctccatccgctcgccgcgccgcaacccggagaggagactgcgctcggtcgagcaccacctgaggcccagcgtcctcgcgagtcgcgaccagctccggcgcggcgtccgccctctgtagccccggtgtccccgcgaccgtcgctgctgtcctacttcgccactcgctaccttggccggcgacgagaaccaccaggacaccaggtattccctccccttggtcctcctttgctgctgcgcgaagccgtgcgcccaaaccttaacctaattcgtaggtaaaaccgtgcgcgcgcccaaaccctaacataccattcgcaatcggatctgaatctaattacaggtgtatatgcatgtattatgactactaacttcgattgcttcgcaaaaattattgggtgtacatgtgtacacccatgtcctttactgggtccgcccctgtgcttagtttgtagttcagctttaacaactgatcgctccatctccactgttttgaatcacctctgctaccgatgaatggcttaattccctctgattttgatttgggtcgtgcttggcttcctgcttgagcgcacatgttagccagtgttgcagctgttggtagaattttgactttattctctagttgtgagtgacagtataggcacacacagactttagattgatgatgtgccttttgcgttgaagtgctcattgaaccgatgctaccgttgtggtagttaactaaattgtttggatacatatgtgaagttttcagctgataagttttaggaaatgttgtttttggcattaagtgatcttattattatatgggtggcccagactgtctacttccgttattttgatttctgaattgccacgtttcacacgagggcagtcatgcatgtgtggcactatagatgttgttagtaccttctctatctatgcacagatttttccgattagatacttgctgaaagctattcatcttgtgctatgctggacaatactagcatactggttattttgtgatcctagttcccttacaaaatttttatcactactttgtaggtttagttgctccgggtttagataggttccttcaatgcatcgtgttgggagtgctggtaacacagctggctcgactcgaccgagaaaggagaagcggttcacatatgtgctcaatgatgctgatgataaaaaggtatgctgtctattaaaataagtcatcgttggtagctctttcagttttgcccccctttagaactagttgctcgtaggtcttctatatatgtttgaaacaatccatattccactcaaaggtcttgctaatgcatttatttctgtttatttttcagcattgtgcagggatcaattgcttggcttatctaaatggttccacatttagtacaagtgactatctttttagcgggagtcgtgatggtaccttgaaaagatgggaattaaataatggggatgcaagcttctcagcaacttttgagtctcatgttgattgggtaggcctttttctgtttttactcaagtagactagttgtttgaaacagcaccagtgcttgaaatagccattatgtttataaacttatgtttctttcaaatgttctctctgaattaggcctatcatacccatttccccatctatatatttaacatgatgtctgaggtctactattggatccaaagcttagcatattttttctattgtccaattgtccatatatttaccatcaacattttaattgacattttgagttctttttattaacagacattcagattgatatgttcaagttggcttccattattttctgcccttctttaccttttcttttttcattcttagttgcaatgtttaaatcaatgcaccactggtttatattcgacaaaatttaacaaagggctaatgtcaaagcaggacttcaatttttttttgttggcatatttgctaaatgctttgttatttccttttagaacaaaacaacataacctcgtaaagatgagtaatcacatgctttagaattagtagtcacatgcctggaaatttgggaaggtggtggcagtgtatttagacatagctccttgggagtttgaaactaacacttaatttatgtttgtaagtggaataatagcatggctgggtgttttatattgtttaagcttttctttattgtgcaggttaatgatgccattatagttggagaaaagcttgtttcctgttcctcagacaccacaataaaggtttgttgcctaatacttaatcctcttaaatattgatcactgagcgtgcatgtctttcatttcctaacttcacaggtctggaattgcttctctgacggtgcctgtaccaggactctccgccagcattctgattacgtgatttgtcttgctgctgctgagaagaatgtaatattatccacgcttctgcttttctgtggtatttttagcttcgtcatttttggttttacagtttttttgtgcctctgaattgtagagcaatattgtagcctctggtggccttggtggtgaggttttcgtttgggaccttgatgctgctcttgctcctgtagcaaaatctgtggatgcaaaagaggatgaggttcctaatggaaactctgggcctgctttgtcaacaatgtgcagcgcaaattctagtagcaatattgcttcctctaatggtcaatcacatgggtacaatccaattgccgccaaaggacacaaagactcagtttatgcactggctatgaatgatacgggaacacttcttctctctggtggcactgaaaaggtatcgcgctcttcatctaacagtataaaaatgaaatttttctctgtgattaggagaccagtcaacagccagtttcagtaggcatttccccccttaaagaactctttattttatttgcaggttgtccgagtgtgggatccgagaacaggttcaaaaaacatgaaattgagagggcacactgacaatatcagagccttacttgttgattctacagggaggttggtgtctaggcatatgctgttccagttccttgatgacattgcttaaacattgaaccacatcttccttctcactgcacactcaactttcatcctaaatgctgccatgattatgtatcagtaatctttgagtttacatatgtatgcatgtatttacaaattgacagttgtaataccaagacatttatgttttcctggtttacaatttaggccctgtttggattcaaagtatttttggagttttagaaaaatgccatggttttgtgaaacacttaagttttggagcgccatgaagtgttggatgcaacaaactttttggttttgaaaatcataatagtatttctaaaactgtagtctttttggagtttggttttgtgaaacacttaagttttggagcgccatgaagtgttggatgcaacaaactttttggttttgaaaaccataatagtatttctaaaactgtagtctatttggagttttaaaaactccactctacctcttatttctaaaccttggttttgcacatctatgggttctaaaactgcattttcgtaatactagtttcttgatgctagagcatccgaacatgcacttactgttcattcataaagattttggatttggatttctattatttgtgcatgaaagagaagtttgcttatggatgagtttacatatgttgactgctgtaataccaagacatctgtgtttcctggttgtttaccatgctagtactcagcttgcctggtttactgcttgctcagaaatattttggacttactatatgaaatcaacaccggtgtttgtgcagaaagagaagtttgtttatggatgcatggttttatagttttatttttttttctggtcagcaatcttttagtgcagtgcatgtaggataatgtttgctccagaaacactatttggagtcagtcagcacttggaaataactgtttatatcatcaatcagttcaaatgaggaatgtaaccgtttagattgacatgttaatgtcgatggtgacattagtttgcagagtcatgtcctggttaccatccaagttgagtaacatggcacataatccactttcatgttagtgcaaatgagttgatgtggaaatgtcttatccgcttatgtgacacattatataactatatatgatggttaaaccatggtggtctaccaggacctggagacagctgtttttttttcacattttaacctgaatatgatttttggatggtcaaaatactgtttttctggatgataacactgagtgatctttcactgtggcctatctagtcctgtctgctttcatcaaaccatgtgctaatcattttttaacaatgttttcaggtattgcctatcaggatcatctgattccatgataaggtaaacacacagctccaacaacccaaccagcataaatgctgtgattagtttgacatcataggtacatatttgaaatactttgcagactatgggacctaggacagcaacgttgtgttcattcttatgctgtgcatactgattcagtttgggcgcttgcaagcactccttcatttggtcatgtctacagtggtggaagagaccaatctgtgagttaaattgttttgtgtgtattttttagtagtcaatttacttcttcattctgaacttttatgtattccctgtattgcaggtatatttaacagatttgtccacaagagagagtgttttactgtgcacaaatgaataccctattctacagttgtctctgcaagatgacacaatatgggtggcaacaactgattcttctgtttatggatggccagctgaagggcgcacaccccaaaaggtcttccaaaagggtggctcattcttagctgggaatttgtcattctcaagggcaagagcatctttagaaggatcagcacctgtaagcatgagggttatcttttttggtccaattatattttttttgaagacactgtaccacgtgccatgatttttgggtttctgcagagacaccattaagttactctgtttactagtagtatgaaatatacagaccataatatgggtctctgttgtgcatagttgacaccatacttgcaggtgtagaggttatcttgaacttgtttaagtgcaatttttggtagtattaattgcatggggtctaaaaggttctgtaaataaatatgcttaagcttgagatctttcccaagtgcccccagtagggttttcttctcagtctagtattctgatgattaacggtttcacttttaacttcttaatctacttactattcggttgttgccctctaagactctagtgtaattttaactaatggtaattaataagggtttgagatctatttcatttttaggttcctgtatacaaagaaccatcatttgttatcccaggagttccagcaataattcaacatgagataatgaataataggaggcatgtactgacaaaggtgagatttttttactcatcctttattactaaacttcaaagagtggcatcatgatatgtgcactcatctccttcaatgcaggacaccactggttcagtcaaattgtgggagatcacccgcggtgctgttattgaagactttggcaaggttcttgtttgtcctcaatttcttggatgttcttccctcggatatatacacattgttaagaactaaaatctgctcatttgtatcccattttgtaatcacagcagttcttacttgatggccttttgaactagcaagatttctgtagaatgctaaactgcctcattttgattatgcaggtttctttcgaagataagaaaaaggagttatttgagatggtattactgaaatgtcatgatttctatgttttattaaaaaaattgctgtgtaatttgttaactgattattaggtaagcatacctgcttggttcaccatggatgctcgattaggatgcttgtctgtccacctggatactccacaatgcttttctgcagaaatatatgcggttgatctaaatgttgctggagcacaagaagatctcaaggtttgtacagcaacatatcattatgtgtactggttacatctgttttcacacttcagtctatagaattttgttgaccctatgaattctactgttaagagcgtaagaaagatctttttcttcgttgatggatctttaattcttatttgctgaatagtatttataacacatcaataacaagcattttggcaaaactatggttgctgctacctacatttcagtgaagtgagatactgagtctacctaatctcatcttctgaatggttctccttataattgtgcagattaatttggctcaagagacccttcggggtttgctagttcattggagtaaaaggaagcagaaatctagttcgcacagcttgcctaatggtgatagttcaatagggaaagatgttccgtcaaaagactcaccccggtcaagatctgaggtggatgatgccactgaaaatcatgcaactcatgtgcttccatcatttgagttttctacagtttcacctccctcaattatcacggaaggttctagtggagggccttggagaaagagaattaccgatttggatggaactgagggtgatcttccatggtggtgtgtggactgtgttactcacaatcgatatccaaaggagaatacaaagtaaatgctcaatacaattcctaatttctcctcagatgatatttttcctttgatatatgatatatcttaaacttcgttcgttatccggaagagattagtttggaacataatagcacccttctattttctaaattttaaattcatgtgttttttaagttcatggtaaacgacatgtcttcaaaacagttcagttggtgagagctttcatagtatttctatctagctgtgattatatgctacttacagtaggctaacttaaagatattgaacttctatttttgaatgaagtattcatctttgaggtctggtaactacatagggtgtgtttggttagcctccaaacctagctttttgcttgaatgggtcaggtttatggtgtttggttgcctggccagtccctggagccaggctccatctggcctaccgtacagccagggccaggcccaagtagaaacaccaggttggtgtttcttctggagccaggctctgactagctccgtgattcatttccgtcaccacttggtctttcactcccgttctgtttcactgctagtcctctacaccggtggtgaccagtcatccgtggtggtgttcgttaaaatgtgtgagagccggtaaccataacagaacagagaagaggtaattttgtacaaaacaagatagacaacaaaacacacccaatggtagccaggcttgtacaatgcacacaaccaaacaactacgaattggcctagttagaacaggctaaagctagcctggcttagttttgctagccaggcttgtattgaaaacgaaccaaacacacctatattaccttattcagtcctgttagattttcccctgcactatatctttatacagagaatcacatgtagactggccctggagctttgtgtagcccaaacagtcggatagtgaactattgaaaacatgtgtgcacaaatacatgcatcagcatccaatatggttttgtttgtgcactactggacatttgagctactgaagattaaagatgctccctggcccctgctatataaatgtgataccgggtgccctatgtaaccattgctttcatggattatttcttcttctgatgtttattttctttatgtaatgcagatgtggcttttatttacatcctgctgaaggctcgcctgcgccaaacataactcaagggaagcttagtgctccacggatattgcgaattcataaggtaagagagttatctaaatcattggtccacagcaaatgcaagatatcatcaaatggtcacggtgaatccgagcacacaacatatggtacaggcggttgttggagatggatggaagaaccagctttttggtggtggtgcttggggggggggggggggtagaactttgttagtaatctggtttgcaaaacagctaactatctacatgtttgcataattgcattagactagctaagcatataccgttttgcgtgcaacattaaaatagtgatgcttcaggacactagatttgaatcattcagatatttatggaattatggcttgactgaatagcatagagtaatttgttgtcattacaaaggaacttctgttattgtaaagtcaccttatttactccctgaaagtttacagctattccatttcgttatacaggtagctaactatgtggttgagaaacttgtgcttgacaaaccggatggaggctctgatagcgcgtttgttatgggattgagttctgctcaatcgcagctctcagcgctagatagttcttcgcggcttggactaaagtcatggcaaaaaacaaagccatgtattgagatattgtgcaataaccaggcaagttctctaaatatagctattgcattctatagttagacacatttttagctacattatgaacaaatggaagaataccctggtccttttttctgtaggaaaagaaagttgcacaacaaactacgtacaacaagcttgcgttgccataagatatcaattgatatttttcaccatttgtttccacctttgttaactgaatagattcctacgattatggtgctacttttagctctccatgttttcaaagttagctgcagtgtgtagacacaccttttgagcagaatccaaatcctaagctggtcaaactctttagtttttgagtaaattctgccatatgctcgttaaaaatatatcttctgttccagtttgaactcatagttaatagaaatattcctgggactgtatttatttgtctcatatatttcctgatattcccatgtttgtaaataagccctatagaaatgtatttgcagtaaatttcccttaagaatctaatgcttattccatgttcttcccctactgttcttgatttatttatgtgggctgcattataaagcattaattgcttcgtagtctgtcttttgctgttgcgctaaagtgttctctgtgatcaggttctatcaccagagatgagtttggctacagtgcgaacatatatatggaagaagccagaagatttgattcttcattatagagtggtccagtcgagatgatcacggcttcagatgtacatgctcacatggttctccagatatgttcagcatgtctgcacgatagatggttttgttgaagatacccttggcttagagaggaaaccatcatctcactgaggaaatattttgcccttgtgcccccgtagccgttcccagaatcccgacttgtttgcatctttgtaaagttcctgatctcgccctggtagtaagatgtatcatagcacaggtataaggttctctgctggctgccaagcttgtaaatgtagaagattgggtgcttaataaaggtcagatggatatgtttttcttttttttttcgtttttctttgacaacgtttgtaagaaaaaaaaaggctgatgctctgctcagaccgtggcgttccgacgtcgattattggattggatttaaccctggcgcatatgctcttggaccctgtcacccaggtttctaaagctgtttttggatcgaatttttagacgcatgtatggagtattaaatatagacaaaaataaaaactaattgcacagtttggtcggaattgatgagacgaatcttttgagtctagttagtctatagttagacaatagttttcacaaacaaacgaaagtgctacagtgtcgcgatttttttcattcatgaactaaacaaggcctatatactccatattgaagtacagatgtagagtttcacggccttcttgagagcaactcggcaccggatcttgttgccctgccgtgccgggcgctgcagtgtccgacaggcaacagcccaagagcgatcactctcacattcatccacagagacagagacagtccacaggacacgacactaccggctgtcccgctggcatattccccggtccaaatctcttcaatcaagcacagtgtgtggccgtcgcctggcactggcagagcacagt

SEQ ID NO: 4849 - DNA, 13191 bp, Sorghum bicolor
acaaatagaccagcagatcactgctacaccgtcaatataataaaatggatctaaaagtgttatcccttatagaatataccaattaattattaaataagttatataaatattaagagtgaattaaggccaagcactatataaactgtcctccagaaaaacctagcataagtgcatacctaaacctaatagtggattcaaagtaccggatggctttcgccgatcggtgtgtgctcctgctcccgtcccatccatggagcactgtgacctgcacatgttgcagccacaaacatatgctgcaagtactaatgctttgttcgcttgagtttatcagccgagtctgaacactactttaatttcagccatggcttatcagccaagtgaacagtttcaagcgaacatgaccagcagctattctctgaatgtctgatggaaaagaggagctaataataactaattacagttagaacaaagcgagtcgatctcaagaccatgagaatcagcactggcacagcacagaggtgagtgacaacaggtgttaccgcaactacccggattagagagcccagctcttttaatatatcctactagctatatgagctttaatttgattgatcgcaccacgcaaccactaaccaaaacacccatgcccgcgagctaccacctacacagcatagatcccatcgagatcgaaacggccacgctgaccacgcgacgacggcgacggcgacgtggaagactcaacacggattagccatgtgtgtagtaactagtaagtatctactaccaccatagcgttcaggatattgaggctttgataattcatgcgctgctcctgacctttcctctatgagcacgaaataattaaacgtggtcgctctgaaagtctggaggatatgctctcaccaataaacatcaccctagctagggcttgtttagttccgaaaaaatttcggatttcgctactgtagcactttcgtttttatttaacaaatattgtccaatataaactaactagaatcaaaagattcgtctcgcgatttacagacaaactgtgtaattagttttttttcgtctatatttaatcactagtacagaggcatactgtacaggcggctggaaaactatttctactggcgtttttcagcaccacctgcgctggaggccagtagaaatgggccaattctacagacggataactaagaaccgcctgtagaaataaatttctacagacggttcagttatgtgaaccgcctgtagaaatgtttttttaaaaaaaatataaaatcgacttttaaaaacagaaaaaaaaaattttaattataggaaagaaccattagcgtgccctgaaaaggttaacatatgcaatcaagggtatgtttggatggagcccttttaggcagctccatctccgccagagatctcaactctagccatccaaaattagctaaacatattttaatcataaataaagttgaaccgaactgaaccgacctgaaatgtaccttttagctttcggttttaatttcggttatgatatcaaagaagaagttcggcttccagaaatcataacacaactgaacctgcacatgagcagcgatcagttttatttagtggaattttattaggggatttttttacttttttttttgcaaaggggaattttttttagtggatggaatgaatgagcaagcgatcagaggtgttcgcgcttgcacacagcagccctagccagcccaacagcaaacagcggcccaattgggagtttgctgttgggccgcagggaagcaggccccagttcctgttgttgggccggacggcccgaccgtaccaggtcggacctcacatgctccattcatgggccttttttgggccctatatgcagcctactaaggaaaaaactatggtctttctcattccacacaagcgtgtggctaaaccctaaaccccgtagccgcgctcgccttcccgccgccggcgagcaccgaagccagtaagccaccatggccaccacctccgccgcctccgagtactccgtcgaccgcaagctctccgcgctcgtggagcaagctcggccgagcgcggcggccatgcgcgccgccgccgaggccgttgacgccgtcgcggagctcgtcaagagggtgccgcagcagcaagcgacgccggatgccgcgcgcgggttcgtgagggacctggggctgggagccgagaagctctcgttcaccttccggccgccggaggtggtgcggctggccgggagccacgcggctggcgcggtcgcgaggccagacgtcgctgctgaccttctcgtgcgcttgccaaaggtatgccgggttcttcgaattcacctgtttgattcactccaacaacttgttttgtgtcaccgtgaacagatgaactgtttattttcatgcgactcattggcctggttctgtctctggcagctgggtgatgcccattttaccttcaaattttctaagccctgtttgtttgagtttatcagccaaatctgccggccagccattcagtagtgtttttctctcgcaacaaatcagcaaacagtagtttctgttatgtttataccttgttcaggatgccagcttataacaatgtattcttgcaggatgccagcttataacaatgtatgcttgtttggtaaaaagtttgttcagttattgttcaatgcacagcttgttcattgaaaagtctgttttctgtctagttcattagattggaagcctgttttcatgtttatttttgctttgctacaatgttcctggtggcaaacaaatctcagctattgaagtgcttatatttgattgtacttcttatactcaaataagctgaaaggaaggtgttgctgggaactatggattttctttatgtttgctctgggtgccattagttttccttcttcacaaacatttagctttatttgactgacatagaactgctgagctatgctaaattgttcaatcaagtcttctcaacaaaatttcgttggttggaaagatataagtagaataagtgatgctccagtcagagtaacctccttttgtcaatctttttttttccccgaaaagagttttctcagcaactagtttggtacaactgctgtggtgaccagcttacaaagacagttcctgaacaaaagaaagcataaaaagatcctattgcatttgcaacaaagattgaaatttcaccaatgtctgtcatttgaaaaagaattagcgtgttagggttgtgaagatgcctaaaatggaatgcaccgtttcaaattcataagtgtctgggtattttaatggaaaatgagcttactacaattacaaagatgacccttctcatgcttttgttttgcatgctgacttgaatcaagcaagacctagttgctacttttggaagtgattaaataaaattttggttttggattgtcatgtgatttgttttgtatgcatccacaggaatgcttccacgagaaggatttcctgaatcaccggtaccatgcaaagaggtgtctttacctctgtgttgtcgagaaaaacttgaggtgctctaaattaatccacaaagtttcatggtctaccctccaagatgaggctcgaaagcctgtgcttcatgtatatccaggttgttcttctaccgaccttccctttttttcacatcattggtgcactcgaagcagatactcctgcaagtggcattttcgtcattttgctcccttcttattttttttttaacttccattggtgcagcaatcgaaattgcagaccttcctggattctatgtaagaataatcccaactgcggattctttgttcaacgtttcaaagttgaatgtatcaacgagaaacaatgtccgggcatatacaaaaggtgatctgactgctttacatatgttcttgttctttgaaactagtgtcattgtaccatagttttggcctttagcatagttgtaagttttttctttaaaactttgctgattggatttgcatttcagatggtgtaaacctacccacaccaaagtacaattgtagcatattggaagatatgtttttggaggaaaatgcagactttattagtagcacctttgctaactggaaagctttgcaggaggccttggtgttggtaaaggtatatttcatcctaatctattgttggtttatgcttgtacatgtgttctcctcccctttaaagcagcctaatgtttaatggaaatgtaggtttgggcacgtcaaagaacttcaatatacacacatgattgtctcaatggatacttaatttctgccatccttgtgtttcttactgtggactctggaggaagcatgattactagatcaatgaccacaagacaaatttttcgtgtattgatgaattttttgggtacatccaagcaacaaaaagttgtttttctatggatatttgaccatctttactcagttgaagcatatctgtattcttgtagcaacttccaaggtgtgggcaaagggattggtgattcaatcaatgaagaagcgtacaatcaccaaagaggtttgtcaaccttctgcataaagtccattgttgggagccatcaaactagatttctatctgtacctgtatatgtagagtaaatggagtagtattttccatacaaaatcataatgtctaaagataagtcctttgccttatagtgtgaacatggtaatacagtatgagtatgacaaattgctacgcatatctagcctggtcatatttcaccatggattcctggagattatagcaataaaaatacctgaaccttggcacagagtgctattgactagtgcaataacgttgagtaacccattgatgttcagttctgatcagaagtgaaatgtttcaggacattgccacttgcctgaagacatttgatgttaccgtatttgatatatctggccacgtaaatttggcgtttcggatgacgaaatcggcttttttagaggtatgtaccattattaaactagtctatatccaccaaaccctttttcattcagcttccttttacctttattcatatctcatgtataactactcaaatgtataaccttgctgtataatccagcaatcactggtagatatctagtttgatgtttttaatttcttgagattcagagtaatgctctccacatcagtgaagctttcaaatttctttgagttcaactcttgtggcctctgccttttccttgttcagcttcaagatgaggcagcttgcgcgcttagttgccttgataaatgcagagatggtggacttgaagagctttttatgaccaaagttgacttttgtgctaagtttgactcatgcttgaggtacgctgaagctgaattatgatgcatcacattggtacatgtattatggacttactggaaccgttatttgagtgaacagtgcagcacatcctcagtttgagactatctagttacatactgcatctgccattatgttgtgtagttacattctgcatctgccattatgttgtgtacttgtgtacggcagtgttatctatttcagatgtccatataaacaatccatgcacccacccaaataaaattttctctcctacttaatgtggctctggcccaacttgtcagcctctttccatattatttccaatctgcacatattgctagtgtcattgagccaattttgcattccagtatccaatgttttcagttcagctggttgaacctagccgacctgggaccgaccagatgattaatcgtgattaatcgtcgaccaggtcgattaatcgaccctggtcgtccatctagtcgtccatgtatatcaggacatatacctatatatgtacctctctatatatactatattatacacaataaaggaagcatcaagactgcattagtgtttagctggtgacttatttgtggaagttgttttcctctcttttctgcactgtccagaggtccatattcatgtcccaaactccatttctttgctgacttgctgctgaaagcctggaataccataattggcaagcagcaacactaatgcagtcttgatcttgacacaccttaacagcagcactgctgcaatagcaaataactaacatttagcagaccatagcagccacacagccagcatattacataaccaaagtccatgtcctggttaaacaggcccaaaaacagagtaaccaaactggtcgtccatgtcctggtcgactaatcagacgactagctttctggtcgagctggtcgagtcggacctcctaatcaaacacttgggaccgaccaggatgactaatcgcgattaatcggatgacctgaaaacattcatcccagattaaagacttctccatcagctgatcaagttttcacttgtatttctttctgtcaggataaacttgaaagggaactctaaggttactgagttaaactattgtgtggatgacgagtcttggagaattcttgagaaagatgttcagtctttgctgcaacgaggacttacagatagaacaaagatgatccgagtcctgtggagaagcacaccttctgaatggaaaatagtggaagtatgtagtgtgaccattagtattatcgatcactttcctgcatttcagtccagtgacaagcacaattttgtagggtttctcagaatttggcagcagtccgcttctcgttggtatgatggttagctcattggaaaagagttttcgccttgttgatattggtccaaaccctgagaaccgcgttgaggtatttttccttttctagattacggaacaatgaactgccagtgccactattgcgatctaacacactgatatgcattattaaatcacaggctattaaatttaggaaattttggggagagaaagctgagcttagaagattcaaggatggaaatattgctgaaagcacaggtaactgatgcattttattttacttcattatctaaaaagtgtgctactcggatagctgttgcattttattcttaatggatcctacttgcttaactgcagtttgggaatgccaatcttgggagaagcacacaattattaaaaggatagctgattatgtgcttatgaaacatctgtcactgcagaaggatgatttgattcatgttgttgatcagctggacttttgcctcttagttgatggccaaggtaagttccaaatttttctatgtgttgctttacagtttacatatccttggttttaagcttatttctaattatgcagatccggtctcgtcttctggagctttgcttgaagcttttgatactatttctaagcagttacgtatcttagatgatattcctcttaaaatatctaccgtgcaacccctagactcaggtttgacacagtatctttttgtattctgtatggtttatgccatagttcttaaggtgtcacctaggcgatgcctaggcgtccaggcgatcccccagcgccttgcaaaatgctcgcctaggcgggcgcctaggcgtccaggtggcggcgcattgtcatgcctcgcctttacgccttaagaactatggtttatgcatgatcttgttttcacatttctctcattgtatgtgacatttcctttcgttttttcttttcttacaccagcttttaggcacacttctgtgtttcctcctgaacctcatccactagcatatggaaggaattctcagaggctaccgaaattcgcaacaacttgcataagatctttagaagttatgattcaggtatgacctttctttagttgtgctgtatcacaatagaatgatattaatttcttattatccctctatgggagctagtatatcacaccccttcattccattttctattctagaactttgggctttgcagacttttcctacaataggggtgggggggtagcacacacattagttgttacttcttcctttacctccttactggcaagaaaataatagaagcctatataatttcatatatggtgctgatttgctcagaatcttgcatgtcatgagacatgatgtttatctgatagagctggccttcattttgggacttgctttgttcacaaatttctccccttcactattttaataatagctagagggatctggtaactggcccttggatcctgtggccatggagaagacaaaggctgcatttcttttaaaaattggtgaaaggtatgtaatagcatctaaggaaaaaattgtttgcttgattcgctttctgttccactgccacattgtttttaatttcagcttggaggatcgaggaatgtttgtttcagccagtgaagatgaggtgaatgtccttacatctggatattcatttttactcaaaatatttcatgaaagaggtttagcgctgcaaaagccaggttagtcttttattacattcaaataatttcctttatttgctaattgattactgtagaaagatcgcagatttccataactttatttcattattatctggcagttggagatgacaagacacaaagtgctctatcagaagataagatgctttttcagcggagccaacactctagtatgattaatggtctgcatggccgttaccagatgtatggaccagtagttaggtaactgccaaggttctgaatgttatttaaacaccccatatcttaaactatgaagcatgcttatgaagctttgcatttgttttctgtttcaaaggctagcaaaaagatggatttctgcacatctattttcttcatttatctcagaggaggcagttgagttggtagttgcgtacatatttttgaagccattcccgttccatgccccttcttctcgggttgctgggtttctcaggtaaacttctggaaactttcatcagcctctggtttaccatctgtattgttgctcgttttatcagcttcaatttttctgttatgtcatagacagatgcctaatgctacattccaaccagctatctttgttatttcttgactgctgaaaaaaaagttcagttagttctgaaaattgagaacagttttgttgaagatctcttagccatcctgtgaaagccacaatttcccccttccaaaacccatttctcaagttgcatattctaatctactccctccattccaaattccaaattataagacgtcttggctttcaagatacataacttttgctatgcatttagatatacactgtctagatacgtagtaaaagcaatgtatctatagaaaagccaaaacgtcttataattttgaacggagggagtagttaattggacatgtggaagagatgcatagcagctggagtctgagccaggaggatgtggtaatggatttcagccagaaagggaattatgaatatttaaggtcatatttaattaggaatgattatcagagttaaggatttgggagggcccaggatccactgttttaaggatgccttgtttcattgttctggataagaatgagtctagtctcccaccagtactatttcgtccctatccctatatcatgttctaatttcgcttttcaataccataatactacttgagccatgtggtctgaccatcccttgtattatagtatcttgtgtatcccaatgttcagtgtatagaggagtgaatgttttcacatagagggaatccattttggtttcttgatacgcgttatagcaaatgtgatagtatgttattaaaggaaaacaaaaatgatatgttgctgattataagttacaattactattagataattattagtaaaggatccattaggatcacttacattaggaaaggatacatcagtaatcctaatggatcctttcctaataataatcaagccattacatctagtttcttatacctaaacataccattttataaggctcataaggttattagtcactttattaggtttctgtgccactctccatccatccatccatcctactttcctagttggttataccttttaccagtcctaataatcatgaccgatgaaaggtgtcaaagtcctctgacgaatcactaaaaaaatcacaggtttttgcggttgttatcaagttttgactggaccttttcacccatggttattgacataaataatgacttcaacctgaaggatgagaaggaaatcaatgtcagttctctctcttcctctctctctcattttttagttagctctataactcttaacatatttgattcatacaactacaggataactttatgctgagcagaaaatcttatgaacaaagccctcatgatatagagcctgcaatgtttctcgctacgtcatatgataaagcatctgaagcatggacaaaacagtcaccaagcaagtcggtatgtgttttattattttacagctgaaaatgactcttgctgttgaacaagtgtgcatcaaggctttggtagtgaagtagaaatgtcgaaaatgcaatctatttccatttatgatgcatatatgacacatttttcccagtttgtaatattggatttgtcttgcaatatgatatggttagactcatgtttagactttaaccatgaatagcatgtatattagcctatcattagtgttcaaaaacacaattaagcactcgccataggcgcccaacacaggccaggaggtaagtagcacatagtcagggaaaatcgggagcggcaggagagtgcggcagcacaagcagacaggagtgtgtgagctggagctcctcaagttgctgctggcatagtgctgccctgccaccccacatgctccctccctggcgcgtgctctagcaaggcctgggccacctgaggctggcgacccaaggcctcacagcgtgcgaagtgaggctggtggtgtgggggagtgtgcagtgctgggaagaggaaagaggcgcaggcgtgtggctttgggaaggaaacagggggctgtggctgaatagggttgtggataaggctgtgaatagaatgggcttgggccacagtgttttctggccaaggagatagtactgctgtcctgctgggccttaggttgtatcaaggatgggatgaatatgtagtgatgcacttatttacatcccagcagaataaaagaaaagacacatacactattgcgtttaatctccacttaggcaccttaggcgctaggcagtgtcctagcgccttttggaaccttgccttgcttattatattgttttatagatggagttatttattctttctgttcattataaacgtaggtccttaaacggatggctgcttatgctaaaagcagtgcacagcttttaacaaatcttatacttcatggtcaatctggagaatatacatgggaggtaattttgttcatccactacttcattggctttatcttattttagtgtctttttttcatactcagtatgaatctttgcatgctatagtgcctgttccgaacacctatgagcaattatgatgctgttattctcctccatcaagagaagctttgttgtccccatcatgtactttttcctgccgaaactccagaaggtcagttccgctttacatcaactacagttgcttcctaattccctgatgttgttacagaagtattctttcagcaaaaatgtaccacaaaatactaaagctgtaaagcataatcaacttcacctctacaattaacagaaattagttgggatttcttgctgaccataactcaattaatcttgtgatacaatagcctaccttcaattcttcatatttttttgttctactgtaacaaccttacaggtaagttggtggtctggggcaaaccaagtaaagatttctgcccctatatgccactcaacaaaggggcagtgaaaggttttcatgacgcaagagataagcttttggtgaactttgacccaactacatacttcttgcgagacttgaaggtaaaagtgttgctcttgatctcttgaaaatatgttcatccatttggattaaaatttgacaccttctatttacagtgtgaattctccaagactttcaagttgtggtatggttcaattggaggagacgctgtgggacttacttgggagaacccaaaggtattagtgacagcttgggccatagaacattttttttcctttgtatctgctcagaaagaaaagatcccttttacactaaacactacacagacttgcgacaagcaatatttttatcggttttcccaataagcactctgtcatgcagaactcttttttttttcttgggcgtagcacaagtgcagatgtattttaagttgtatgaattttttacatgtcacagaagcgtggcagagaggaggctgatgaaactgagccagagcccacatctatccttaaggaggttggagacgttggtaaaggtttagtgaggggtgtgtatcttgtcaaggcaccaaagcttcagtaaaagaacacgggtacaactgaagatctgaccgaacaagccgatgcacaaggaagacttgtatcatttgcacaccaacacaacttccaaatgtggtagtcttccaactggcaagagaagcaaaggttcgagggcgtttagaggctggcaatgggggagcaattgtatgtagtcatggagtcgtaaacaagtgaagattgtgttgtgtttagactactactacacagctgccaaaaaaggaaatcgaggttgtagagtctcgaaattttgacactgcaggatatgtgaaatgaaatgtaattttgcaatatctgctgcaatgaaaatgccaatcaatttgacgtgccaagttgtgtctatttggtttcagatggaacatgtactggatgtgcattggcatgcaagtcagactgcgtcctttgtaccatcatctccaacttttttgcattttgcctttacaagagacggaaacagtctgtggaaagggatcggtagctttatttaataaattttgcaaagcgactcgttcaaattattggcattattcaactttaatttcttttataaaaaccgagaaactgtacaactaattttccaaagcgtgtactcattcattcaaatttcaaagttgaaaagagtctgcagaaagcagtcggtagctttatttaacaaattttgcaaggttgagtcgttcaaatcattggtatcatttcaagtttagtttcttaaaaattagaaaaacggaaattgtacctgcaacctatttccaaagggtgtaccggtttttagaaagagaaattgtatctgcaacatatttcccaaaaggtgtaccgttttttagaaaggg

SEQ ID NO: 4850 - DNA, 3495 bp, Sorghum bicolor
  misc_feature (1)..(1168): n is a, c, g, or t
nnnnnnnnnnnnnnnnnnnnnnnnnnnnnnnnnnnnnnnnnnnnnnnnnnnnnnnnnnnnnnnnnnnnnnnnnnnnnnnnnnnnnnnnnnnnnnnnnnnnnnnnnnnnnnnnnnnnnnnnnnnnnnnnnnnnnnnnnnnnnnnnnnnnnnnnnnnnnnnnnnnnnnnnnnnnnnnnnnnnnnnnnnnnnnnnnnnnnnnnnnnnnnnnnnnnnnnnnnnnnnnnnnnnnnnnnnnnnnnnnnnnnnnnnnnnnnnnnnnnnnnnnnnnnnnnnnnnnnnnnnnnnnnnnnnnnnnnnnnnnnnnnnnnnnnnnnnnnnnnnnnnnnnnnnnnnnnnnnnnnnnnnnnnnnnnnnnnnnnnnnnnnnnnnnnnnnnnnnnnnnnnnnnnnnnnnnnnnnnnnnnnnnnnnnnnnnnnnnnnnnnnnnnnnnnnnnnnnnnnnnnnnnnnnnnnnnnnnnnnnnnnnnnnnnnnnnnnnnnnnnnnnnnnnnnnnnnnnnnnnnnnnnnnnnnnnnnnnnnnnnnnnnnnnnnnnnnnnnnnnnnnnnnnnnnnnnnnnnnnnnnnnnnnnnnnnnnnnnnnnnnnnnnnnnnnnnnnnnnnnnnnnnnnnnnnnnnnnnnnnnnnnnnnnnnnnnnnnnnnnnnnnnnnnnnnnnnnnnnnnnnnnnnnnnnnnnnnnnnnnnnnnnnnnnnnnnnnnnnnnnnnnnnnnnnnnnnnnnnnnnnnnnnnnnnnnnnnnnnnnnnnnnnnnnnnnnnnnnnnnnnnnnnnnnnnnnnnnnnnnnnnnnnnnnnnnnnnnnnnnnnnnnnnnnnnnnnnnnnnnnnnnnnnnnnnnnnnnnnnnnnnnnnnnnnnnnnnnnnnnnnnnnnnnnnnnnnnnnnnnnnnnnnnnnnnnnnnnnnnnnnnnnnnnnnnnnnnnnnnnnnnnnnnnnnnnnnnnnnnnnnnnnnnnnnnnnnnnnnnnnnnnnnnnnnnnnnnnnnnnnnnnnnnnnnnnnnnnnnnnnnnnnnnnnnnnnnnnnnnnnnnnnnnnnnnnnnnnnnnnnnnnnnnnnnnnnnnnnnnnnnnnnnnnnnnnnnnnnnnnnnnnnnnnnnnnnnnnnnnnnnnnnnnnnnnnnnnnnnnnnnnnnnnnnnnnnnnnnnnnnnnnnnnnnnnnnnnnnnnnnnnnnnnattatctaggcaacttgtgtagtaattgagtcaaagagagtttatccgcatgaaaattatttcttctcgttcttcttaaaactattatcacgtcatttaaaatgtttatgtgagagcctagttaaacacaaataaagcttccactgagacttagtgaaacaaagaatagtcaatacttcaataaaaaggggtaccatcaatcacccgaattatctagtccacgaatcattttttattcgtttgattgttttgccttgtctttagtgcactggtgttggtttgtttactgcggtctggtacaatcaatagacaacaggtagggcaaagcgacgcactcagaattgatttgctttcatctaaatgacgaatgtaatactatttaggtaattgtacatggattgtttgttaattaaatgtaattatacaggaacataatgacacattattcgtttgctgtaccctctagtatagtacaggggtggctgaaaaaatcgccgtccaaaaattacgcacctttgtacgtacgcgttaataacgcgtataaagtatgcatgacttgtcctagctagaccaatgcatgaatcgtagtggccacaagatataaatcagagaagtactatatacacaagtgccttgtgcatgcataccttaattatgacacattgacacgtgtacgtatttccgcatcacaataatatatccatgtcaacagttaattaataataaccacgtcatctccaccgtccatgccaccacagtccacttgccggctccgatccatccatccatccgactataaaagccgagcaagtgccaaggcaccaaccactcatatccaattgtcactcgctcgatctgtttcctccagcaaattaaaggtcacatctcgatcactatccactactgcacacagcacacatggcggaggagaagcaccaccaccaccacctgttccaccacaagaaggacgaggagcagctggagcagcccgtcgccggcggcgggtacgggtacggcgaggccgccgagtacacggagaccacggtgacggaggtggtgtccaccggcggcgaggacgagtacgacacgtacaagaaggaggagaaggagcacaagcacaagcagcacctcggcgaggccggcgccatcgccgccggcgccttcgcactcgtacgtcgtcgtcgttgtcgtcgtccgacgattattgttaattattatcatattttattacctatatatatatatatatatatatatatatatatatatatatatatatatatatggattgaacgaacgagctgatgatgatctcgtacaacatatgcatgcatgttacagtacgagaagcacgaggcgaagaaggacccggagcacgcgcaccggcacaagatcgaggaggagatcgcggcggcggcggccgtgggatccggcggcttcgccttccacgagcaccacgagaagaagaaggaccacaaggaggccgaggaggccgccggcgagaagaagcaccacttcttcggctgatttcatttctcccggcccatcaatcgtatacgtcccgtcgacgacgtacgtgtgcgtgcacgtacggccacatgtatgtatatgtatgttgtacacgtatatgtatctacgcgtgcgtgtgagagtgagatcgagagactgagaggtgggcccgctcgacgtacatgtatatgcgttctggatgaataagcggttactatatgtaacctgtcgtgtatacgtgtgtgtatatgtacctgtgtatgattgtgatatatgatgactgaaaaatgcgtacagctctgattttgcttatgtgtttacgtgtgtccaacagttttggtgcccatttatttcattggactacttgctagtagtactagcctaatcttgcgccagtggtataagaattactgaattactactttaaggtgtgtgtgttcagcgggtagatagagataacacgtctgttttttttacacgcaatattaattttgtcctaagttaaatattttcatctgcttaggccttttttagtttacgaaaagaaaagttttttaagcactatagcacatttgtaactatagcaattagtgtccaatcatgagctaattaggctcaaaaaaatttgtctcgcaaaataaatgcaaactatacaattagttatttttttatctatatttaatattttatgtatgtgtctaagcattcgatgaaatggagaaaaaagtttttggctgggaactaaacaaagccttacaaaaaatttacacgttgtaactatcaactttagaaaatttatacatttgtacaacatatta

SEQ ID NO: 4851 - DNA, 3781 bp, Sorghum bicolor
  misc_feature (779)..(878): n is a, c, g, or t
ccagagctcatatcctcctgtcatagtgatcaaggtaggtcaacggagcatgtattttgcctgttcgtttcttctccattgcaattttctatatatttcatgtataatttgatatttattgtgtggtcaaactagtttctacccctatttcgatcactccaagattcatgttgggactaatccaagtatccaacatagggctccaaacatatactatataaaaacaaagtctccaactatcaaaccttgtggatacaacttccctagctatgggggtgattggttgctccttggtctgccatccgggatggagggcctctgcaggctcaaactattccagatgaaaccatgcaccttggtttgtttggttgcaaatgagtgtagcatactggatcataggaatcgtgtttggttgcttgtctagacagttttgtggtatgacttggtgtgaccagctgtgtttggtttggtgcatgataaaaggtgagagcacacgtgtatggttttggtgaggttaccactctagtcaccagcaagaacaaagactgaaccatagcaataaatgatgtagtattgaacagattggcctcagatattagatgctcctcggttgaccttgagcttggagcataagaaacaaagttttagtacctgaacacaagctcaaggtcatccgtttttggtaacacacttgacatgcaaataagatatcatcattggcaattcgatagcgccaaagttctattaaccgcacaaaaatgcaagagaagaaacaatannnnnnnnnnnnnnnnnnnnnnnnnnnnnnnnnnnnnnnnnnnnnnnnnnnnnnnnnnnnnnnnnnnnnnnnnnnnnnnnnnnnnnnnnnnnnnnnnnnncgcgccaacggtccgccagagatcgacgacaatgatggcggagggaggccgagaaggtggaagaggattcaccgcaccgggagaggagagaaaggagaggcaccaaataagggaggtaagcctaacacccacccgcgcgcgctaggacgctccaatctcccgcgctcgcgcctccccttcccgccaaggagcgcaccgtccgggatggcgagggaagctcgcctcaagaagaggtctcaaccggaacggagggggaaaagagaatgagaagatacaccaaacgatacaagttgaggaaccaaacacgggctaggtgcacagaatcatatcggatgggcattaggatgccaccgtcgcggcaaccaatcaccccctatatactcactccgtcccaaaatagatgtcattctcacatcccgagaagtcaaaacgctttttactttgactaaatatatctaaaagattattaatatttataacacataattaatatcattaaatagatcgttgaatgtatttttataataaatctagtcaaagttgcgaaaaattgacccgcatgcatcccatagcgacatctattttggaacggagggagtatggtatatagtttgggtcccacgtgctaacttcatatatgccatatagttcctttttttgtcaaataatttttatgaaggttgattactgtttggcatgttgtcatatatatttgtagaactctgccttgttggtttttgtgttagtaatcctatttctaccccaaaaaaacactatttaacttggcatggtcttctttggatttcaaaatgcatgtaatatgcaccttataattctggatggagaccggagagactgacatatgtaggtttactatgatattttttcccaagatctttttaccacgatattacttgaattagaggtggcccaggccagacagcagcgcagagaaatgttaccacaaaaaaaaaaaaggaagatcatcacgtgcggacaagtggacagcgcaggatcggagctgaaaaaaaccacctcatccacatgcacagccggaggctcctgcccacctcacaatgccaccccagcctgctcccaaatatccatccagtggcagggaaacaaatcctatcccttcctacgccggctcacctggaatagtcaccacattccttctcgccgcggacgcgcgtgaggtgagtgtgagagacgaccaccacacccgcgacaacaacaatggccctggagacgtgcttcagagcgtgggcgctgcacgccgcccctgccgctggtggcaaggacagcaggctcctcgtcgtcggcagcagcagcggcagcggcagtaacctggttctgccgtcgaagcgggccgccgccgccgcggtcgtcgcgccgctgtccgtcggccgcgtcgccacgcgccggccgcggcatgtctgccagtccaagaacgccgtcgacgaaggtaaccatatatatatatataggagtattttccggcggcaaatatataaagatagatagactgacggttggggcatggatgcagtgctggtggcggacgagaagaattgggacgggatggtgatggcgtgcgagacgccggtgctggtggagttctgggcgccgtggtgcgggccgtgcaggatgatcgcgccggtgatcgacgagctggccaaggactacgccggcaagatcacgtgctgcaaggtgaacacggacgagagccccaacgtggcgtccacctacggcatccgcagcatccccaccgtgctcatcttcaaggccggcgagaagaaggagagcgtcatcggcgccgtcccaaagtccacgctcaccacactcatcgacaagtacatcggcacctcatgagcatataatagctcactgttgtatcgtaatattgggatcgatcgatgcgtgcatgaacaacttaattaaatacataagtgtccatatgctcgcgcatatacaccacccatgtatctcctctagtcttgcatacggatgtcatgatcgacgcgttaattaattcaggcagggcagccatctgctactgctcagttattatatgtatgtatacttctctatatgtcaaatccaaagtacattaattagtttattaagtgcatgatttcacttcatcatatgttagtataattcatatgtgtatatattgttggtgatgtgcccaggaggcaatcatgcctattatgggttggatatccataaatgggctaaaccataattcattagtttatagtactaataatgtgcccataataggtgaagatgaaacatgcaatattagtttgtaccatatttgctgttgccgtagagatagaaagttatccgcttgtacaaaaatgtaccaacaccccatgaaaaggacaacttttggtccttcaaagcctatatataatcataagccccttttctctccctctcggcagctctgccggtgctagtgctagcacacgggtgcttgggcttccatctccgcacatgtggagatttgtgctgaacctgacgaggtgaactcgtatgtgttgtcacacacgcatactctccagaacaacacatctccagctacaggtcataatacaaaggcaacagatctagtgcaaactcatctcctgtgcaaactctaatctgaaccgcaggatgttgatccaagaagacgcataagagaggtggaaggagggatttgtaaaagtgtgattaagagcagacggttaagtgcaaaattacccaatctctccgccccttagatcaacatcctatggtccagattagagtttacacagtttgcacgggagatgagtttacactagatccgttgcctaatacaaatgcacatgaatgatacacatagtaaactcagagcccggcttccaacccat

SEQ ID NO: 4852 - DNA, 3538 bp, Sorghum bicolor
gcaaaataaaaaaaatttctaaactttctgatttttttaggttttaaatattgtagcactttcatttttatttaataattattgtctaattataaaataactaagcttaaaagatttatcttatgatttacagataaactatataattaatttttattttcatgtctttttaatgcctcatgtatgcgacgcaagattcgatgtgatagaaaatttttaaaaaaaaattagtttttagggtgaactaaacaaggcctacgaatgggcattccttatgagagtactctctcactctctcgacaccacacgctcgtgagatgtgccaggggtcccacatgtcagcagcataaatgacatgacaaaaacgatgatgtgaaggtaagtcattaatccccaaatacttcattagttttagaacgtaggtaaaatacatgtttttattttgttcaagtcaaaagttttctaatcttgaccaataagccaagaccatgaaaaacaataggcgaggaaagatcagctaatagtgtgcaatagataactaatgctggagtgatgtttagatttcctgttgtataatataatctcccttagcttttggtagcgcatgtccatgttgccaccaaccaaacgggcttgagggccagcgctacgcttcgcttcgatcgtctgggattcatgctcactagtggagctagaaagcaaccatagaaaccaaaaagctactgtagttgcttcgtctggctcctctgtccatacatgtggatccctccttggatgcatggtggacgacgattagagcacgaggcagaggcgccgagatatgaggcaagtgaggcatcgtggaagtgaagaaggtggcacgatgaccggggtggggatgagggaggcgaccacgtgtgaggaggcagagattaagaagggagcgtggctgaggtagaggcgaatgagaggaaggaaagggagaaagaaactacaatagaaaaaagaaacaacattatggatattttactctttttacttatcatgagaaattgttttaataaacatttttctatggagttatctagatctaaagaaaactactccagcaaaagatcgatctagagtcagagcagttttagttagagtagagcgagctctaccaaacacaccctacatttatttaataaagttagaaaagtttgatttgagacataaataaaactatgttcgttttgtacaaacatacgggtatgcatgtttctttcccaactaattgtccaacttgccaaactataaaggataaaatagaaatttctcactttaaccaactatcaatcactataatctactccctccgtcccacaagtaaacgtatttctttgacttctacgatacatgtttgactgttcgtcttattcaaaaaaatttaataaatattatttattttttatgacttattttattgttagatatatttttacaataattttgttattttattatttgtataaaaaatttaaataagacaaatgatcaaatatgaatcgtaccggtcaaagaaatgcatttatttgtgggacgaaggtagtattatgtataattcagattataataaccaagtcatgatccaaacagctagaccttaaaataaaaagcaatgctaagtaatgtaagtagaacgctatatatcaagtcgtggctccagatattataggaaacattatatatagcaaaaatatgccactaaataaaattggaatggggttggactctctgaaagtcacaggcctctccatccatgccacctaagcaagcaatgccttcctcaagatctgcatacccaagggtcacccgccacgtgtcacacgggcccaccgacatttggataatttgtgccacgtgtgcaaagcccagccaatgggatggaagcagcctcaccctatccacacgcccggcaccacaaccacaaccctctacagcctccacacctgcaggcacccacgatcaaaaacaaaaccatcctcactctcccctgctgccagccaaccaagctccaagctccaagcacgcacagccactcagccacaccacaccaagatcatggccggcgtgaactccagcgtcgtcggactcaagcccgccgcggcagtgccccaggccgccgccgccgccgcctcgtcgcaggcgaagcgggtgcagctggtcgcgcccgagggccgccgcgccgcgctgctcggcctggcggccgtcttcgccgtcaccgccaccaccggatcggccaaggccgggatcatcgacgagtaccttgagaagagcaaggccaacaaggtctgtcgtcgtttcgtgtgtattattttatgagagctgttgctagcttgtttcaatgcatggaagtgaaacctgacaggattttccttttttttgctgcgatcgatcgatcaggagctgaatgacaagaagaggctggccaccagcggcgccaactttgcgcgcgcctacaccgtcgagttcggcagctgcacgttcccctacaacttcactgggtgccaggacctcgccaagcagaaggttgttcacatattctcatcacactcataagaaactttttatttttcgagaacaagttcgctgatgtgtgtttcattgagaggagatcgatactcataagaaacctcacctgatcgatcgataataatctgaattattgatttcttcgatctcatgttgtgccatatagatatcatgtgtgtcgtccgtgcttgcttgtgttgttgcagaaagtgcccttcatcaccgacgacctcgagatcgagtgcgaggggaaggagaagttcaagtgcggctccaacgttttctggaagtggggtgaagcaaaatgaggaggcgacctggtggtgtacatgtacgtgtgtgtgtacctagatgtgcgcccaaactgcaggaagaatttggatgtgtaattgtggtcagtgtatttgtgtcatctcatcatctgattgatcatcatgaacctcttgcattaattggggagagtgaattatagtattttgtccttgatcgccttctcgtttcataggcgcttatgagttttccctacaaaacacgacaaaagaaagatataatttttctattacgataagccctggaactcgattaatatgctgctcaaattttatatatttgttgagcacttaacgatctcaaatgacaaaaatcagtactaggaatatgtggatctcatcaagggttataattttgatatacaaagtatctttatctgacaccatgcaagaaaaatataatttttctaatataataattaatatgcttcccaaacttaatactccctccagacttgtaaaagaaatcgttttggatagcgacacagtcttcaaatcataactttaactccttatttttataaaaaaatattttgaaaactatatattttatgaaagtacatttcaagacaattctatttatatgacttttatatttccaaactcaataacttaaaaattattcatgatttccattcccaatatttaactcaaac

SEQ ID NO: 4853 - DNA, 2855 bp, Sorghum bicolor
aaatttccatattaattgcatgatccaattatttattaaaaatcataaaccgctgccatgcaatcatttaaatcatcataaattaatttatacagcaactaatatgtgacatatttttcccggagactaatcatccatgcagagccaataaaacaagtttcatattttttgagttatattttaattactatgcattttccaattttcagcaaaaacatggattaaatatatttgtacagagaagtggttcaaacataacatgcaatcataccaattggtagatctagaattatagaacacaccaaaatttacttcatcatttttggagccatatatctcaagatatggattttataccatttaaatcattttctggaaaaccttttaaaacgaaaatcgactcaaaatgctaagtgcacccggattcaaacccgtagagccactgacaggcgggtcccgtaggtcacccgaccccacttgtcggccaccccgagttcccgcggccaaagacccgccagaatctcaccgccggtgaggtctccggcgacaccggcttcacggacgcgagacgaatctggcgtgccctttttggcgcctgacgagcaccggaactacctcgtcgtcgagaatggcggacgcggcggcactgctcgccgtggtccgaccacctcgcggcgatagagcgtgcgctagcgattggaacgggtgcgcaatgccaaggcggagctaacgcgcctaaaaacgcaagcaatggtggagaggagagggagaaccgtgtggactgagaggtcgccggagctccgactcactccggtgagctctaccgggcgcgcgagactcaccgagcacgactgagcgcgagcacggggtgcggaaggacgaggcggagccgttggcgctcgcggaggagagggaggaggccggagctggcagggagagaagctccaagcatcggcggcgatggcgcgcggcggagcggctgctgctgcacgcgagcgagagagagggcgagagcgcgagcagaggggcgcgtctggcagcggggacggaggcggacgcggccgggagctcctggtggccgaccagggcgcgtccaagccgtcgcatgcgcgccacgcggcggtcgagctctgccggctcgccacggcggcacggctcggccgtccgcgcgcggacgcggcgcgggcgcgagcgcggggaagggggcgagcgcgggcgggctgagccggcttcggccagtgggccagaagtgaggccgcggcctgctagcgcccgcctttctttttttttcatttttttaaatttgttttctcaatttcttttttttttctaaattcatttggactattttaaaacccttttcacccttggctcccaaaacaaaagttgttacaaataaaaagttctacaactttgttataagttgaaatcccaaattccaaatagaatttgaaatacagctcaaaatgagttataggtttttaaataaatctattttgggaatttttgtattaaatccatttctcaaattctatagctccaaaaatttcacaaaattattcttaattcttctaaaacatatttcaatctattttggtcatttcaagaaatttggaagcaagcatactatttttatcatatttaagtcatgtaaattaagcacatgaaatcacacttgaattactactatgctcatgtgatgttatgcttatgccatgcttgatgagaatgtttatgagagagtttatgagactaagtgcatgcttaacacctagggtgttacactagccatccccactaaaagttctcacctgtcacacctaaaccacacatctcgctttgtcgaaacattcaatcaggaggtgaaggagaggccgggcttgctattaaaccataaaacacaagctttaaccatggcaaaactactcttgggtttgctccttgtccttgtcattatagggacagcatcggccgataactgtgataaagatgcggaagccatgaagcaagagtgcaagaagttcgaggtgttccccgcgaacccaaagttgcaaccgtcgccggcatgctgcgctgtgtggcagagggcagacatcccatgcctatgcaaaagggtcaccccggaagtagagaaggtgtggtgcatggagaaggtcgtgtatgtcgccaactactgcaagaagccttttacacctggctacaagtgcgggagtaagttaacacttagcatatatacatactgttatccaagttgatgcggattattgttgtatggtgtacatgactactccaagcgtgactgattttgtatattggttggtttttgcaggttatacggttcctaaaagcctctaaatagagcatttggacatgcatggtactctatactgaagcttgcatttgagatttgtaacatgtgagggagtgagggactatgttgaggagaataatgtgtatcgagtactttgtatgaaaagcgttggagaattgataatgtttggcttttatcttactgcttccttggtcttgctttttttatggaagaattctatgtgatacaacgtggggctgcattaataatttacactactgcataaatcatggaggtgggcaaaaagggttaatggagacgggcaatacaacagcctccaattgatgtccttggttaatcgtcgattaacggaggcggttgctttgtatgtcttcgtaaatcaaacagaaagaataaaaaacaaaaacacgtgaacaggcccgccgagcccatccatggactgccgttgccgcagccattcaccggaacctagattgcacgcaccgtcgggatccgacctcccgctgccggatcaagatgcccg

SEQ ID NO: 4854 - DNA, 4586 bp, Sorghum bicolor
gtccctttaattatgcctccttatgctaaatagcgtatttgggactaatataaattgcaacataaaaggataactaaacttatataaaataactgggccaacaatcaaggcccgcccctagccacctaattcagcggtccgccggatgtctcgggcccgccgctgacgtgtgtatgtgcggccccacatgacatctctccccccctcaagatccagctcgtcctcgagctggaaggcgggatacttctcgcgaaaatcatccaagtcttcccatgtcgctgaagaagacggttcaccctgccaatgaaccaggacctggcgaactcccctggcgagacgaacctgctccacccgtgcaggtagtagaattgcggcgctgtgacggcggtggggagaagggctgctgcggctgcgcgctagggtttgcgggaggcgggggggttggatgagggagaagataaatgcctgagagtttgcggggtgggggggttgagggtgggattcggatacggttgcgattggtgggctggcatgggtgttagtgcacagttgcaggccctgcaggccaaatttttttgccacaaaaattttagcccctgtttagttggcaggccaaaaaatttgctctttgggccaaattttttgcaatctaaacagggccttatgcaaagaatgatcaatatgagaagagcctgaacaatatagcagagaagttgcctgcacaggtctccttagctccttcttatttccactctctcagttcctcttccgagccagaacagatatacgcagcggggctctgtcgggaggacagtcctcctagtgtttgcaagttctgcatccgtcaggcgtttcagggtgtaggagtgcggtgcccttttaggaaggttgcggctatagtctatgctagatgcagcttgtggatgtcaaatagggagtttgtagatcagaatttcaacggcatttatttcttgaggtacaacatgtctagagctccaattgaaagggagattcttggaacaagtgttgttgggctagtacgggcagtggcagtggagacagcgaagtcggcggctcgctttgctatagcccagcaagaaattgttggcgcagcaaacggatacactatatatgcttttgcacagtgtataccgagagtgacgagggactgcgaattttgtctggaagatctgatcagcagtgcaaacatgtttcttcggacgtcagtaggaggggaaagctcagcgttgtggtgccagttccgatgggagctttatccgttcatcactggggtgactcctatgttcatcaacggggtgagtcctacgccagcagaaggtacgtagctatggaacagactaaaaaaaattctttcataacagttttccctctgtctaacttcatggcaatcctttagcaggaaagcatggatctagttctgagcatcagtggaaacgaaacttcgttatactgtctgtagtcgtaggttctgcagtgcttgctatactgattgtttcagctatagtatggtcagtgcaaaggttgaggaacaagcgactacatagacatagctcgacgacgacacctgcaggtgagttcgtaagaaacaagatatattgttctgctctgtacgattacatatgattacatatataagctaattggtcctgaattaggcgaaaggctcgaatgcatggagaccacatctttagaaaagaagtgcccagagactggagaaggatcatctagcaaggtaacattgtatacatacaaactgcgtatatattaaggaaaatacctaaactatctataattaatatatagactgagtgaatacctaaacaaagggaattaattatttaatttgaacttgcatctgtttccttgttcctaatgattcctgctgtttcctttgaaaaatactggaataggtaccggagtcctcgatgcttggaactccaaagccagtggaagaatccatgggagatgcctgttccagaatggatctaagtgccattcatcaaatcctagttacaagagattacagagatgatgaagggagcactgaggtaaaataaattgacatccatccatccaatcttttagctgtctttgtaggatttgtgaaattgacattgttatccttctgcagctgtcttttgaaggatggacacagcaggcgagggatgtgttggatgcaaggaaacgtggagactctgccttcgaatgcagaagatatgaaattgctatcaatggttacagtgaggtataatttagctgtaactgtagagatcgggataatttaatttgttttgtttcaatggagctgattcttctttttgtttgttgcacagtttgtcgatgcagggacaacggtgtcaccaaccgtattcattaggcgaagcttgtgctaccttatgtgcgacaagcctgaggctgccctccgtgatgcaatgctagcacagtcgttctgccctgaatggccgacagtgttctacatgcaatcagtagccctatccaagatgaatatgcagagtgacgcggtggacatgctgaacgaagcatatcagctagaagagatgaggaggcaaacgagcacacagctcagatagtggcacccctttcatatatacgtaacatatatatagaagatttgcagtatgtagtagagcacagaagttgttttgtactagattagatcagatcagatcgatctaatataagatgagacgaacctaacacagatggttcattcatgattaattctttttcatgatacttgaagtcctaaagttggcaagtcgcaaaaaaaagtcctcaagttggtgaagaagtctaatctattagtgccaaagatcctgaatgagagataattaattcctaagtaccatgcgtttctgcttttctatgcaacttcatattttctgagatcgtgcttcatgccttacactgctttgtgatgaatataaggattgcgtcctcgtcaaaacactactggaatcgcacgctttgcctagtgtccaggacactcggcaaacggccaaaaacactcggcaaacagtttgtcgagtgccacactcggcaaagaggagacggcaaaaagagtaacggcaaagcaggctttgccgagtgtcctttttcgggcactcggcaaaggctttgccgagtgcccgtttgacactcggcaaacaatactagccgtcacggccattccacggtttgacactcggcaaaggcattttttttaaacaaagtagtatcgatctaagacgaaaaaggattgtgtcagtaaacactaggcaaaacataagacactcggcatagatcgtgtctccggtagtaaaagaaaaaaaaaggattgtgtcagtaaacaaagtagtataattaaatctaatcatgtttaacagtaagagattagggcttactattttcgctcttaccagctggtaagtatcgatctaagcgattaaggttctaataagctttttccattttgagcaatgaatcacaggttagtttaatctcctgcaattaagggtgttcttcgccaacattaagacgaacaatcaaaaggagatgatttagcaaattgcaataatataagtcctaaaaattataagtttctcggctcgggggaagggttggtttccttcgcaggatctgtcatgagcattgaataccggacaggccccctctccccgcgtcttccgtacatgcgactcagggggcgactcctccaggccgatccactccgctgccactactcaccggctagcggcggcggcggccagctgtggcgcccaacaagacatagccacaacagcttcccctacctctcctcctctcccttccccactccacctcttctccatttgacctctgaagttcatggcgcaaggtcagattgtggcaaggtggaagcatcagatctgggttccctaagcccagatccagcaccccctaccccggatccagcacgaggcggtagctagaacttggggtggctgggccatggctagctcgcgggtgacctgcttgcctagatccgacccaaggcggttgcaagggcacggcggccagcggtaggaggccaagtgaccatgcagatccggcccgagcctgctagaggcaggcggtcgtacggcaggccacggaatccatgcttccacacgtgtgcctagtgcggtctttctagggtagatggcagcccctagcactcctcggcactgccacacgttcgggcattagcaccgatcgggaagggtctgttgtcccggttcccgagccggtactgcccttccgggtcccggttcgggcaaccggggctaaagcccccccctttaacacgggttggtaacaccaaccggtgttaaagggtcctgccagggctgccacgttgcaggaccctttaacaccggttggtattaccaaccggtgttaaagggtttctttttcttttttttggttcacttcttcggttctatttattgtctatatataatatataataataggtttttcaatacatgttttgctgatacaataatatatttatattacacgcatattaagcatatataaatgaa

SEQ ID NO: 4855 - DNA, 6339 bp, Sorghum bicolor
taaaaatccacactaagagcatggtcaataatagagccaagtgcttggctataaaccaaataattagagctaagttatacaataagttgtctcatacttatctctaaaatacattctctttcatcttccttctcacgacacttgctatttgaggcccactactatctatgcatccgtgtctagcttggtgcttgcataagagccaagctatcatctctctcttgtcttctctcctccacatcactattaacttggctataagcccattattgtacttgctctaagcattgtcatagggtttgtttcattcgacattagttttaagcaaagttttgttaatgatatcgagtcaatggccatttaaacagactaaatatcaattaaactaaatgaacgaccaattaaaccagaacggtgttccatcgtgtaaacgctacatggtgtttaaatagactataaaccttggtgtagagaatagtacttttaggttaactatatagtttcggggttcctcttataccttcacagcacaatgatgcatttaattacatgtaaacagttgataccctaatgtgcattaggacagtgttatgttatcattcttgcacccattaagataatatgatttttttttttgtaaagaatgtggtacgaaaagaaacctgaacatcccttaatgcaacgggagcgttttggtgaaatgggttgtgcaagctgatggcggtcaattccggaccccgttatcaatcaacaaaactccaccaaacggtaagctcaaaacgaggatgagatgtgaatgccaagttgccgttggggcaacagataacacatcaccatccatctcaaggaaagtctgaaaccgtggtcaggagatgaaaaccgagagtgcggccctggaaacaaaattatggtagtcttgtttagttctctacttaaaaaaacttttcactcatcacatcgaatctttaaacatatacattgaacattaaatatagacaaaaataaaaagtaattacacaatttacatgtagattgcaagaaaaatattttaaacttaattagactccattcgcttatcttataagccgcattttttttgtcaaccaacagttttgttctctcataataaattagcgaacaatatttttagacataaccttttagaccagcaaataagttaccaaataaaataaaaatagtactgtaggtaaatctaaatttttttggaaaaggacaggtagcagggtggtgcaggggcacacggtcggtgacaaatcagcggaccgccgctggtgttctgcctcctggattcgctgcacgcacgtttttggttttcctcaaccagcggcgcctcccacgatatggcagccgccccctggttcgccacgccagatttccgaattcaccctcagctatatccgtgttggccagggccttgtttagttctgcaaaaaatttcggattttactaatgtagtatttttgtttatttgtagcaaatatttatctaatcataaactaactagactcaaaagattcatctcgtaaattaaagacaaactatataattagttttttgtttttttctatatttagtgcttcatgtatatgccacaagatttgatgtgacggggaattttgaaaattttttgaattttagggtaaactaaacaaggcctcttcgaaaaacccaaaaatttttaaaattctctgtcacatcgaatttttaaacatatgtataaaatattaaatataaacgaaaataaaaactaattatatagtttatctgtaatttgcgagatgaatagtttaaacttagatagtttataattagacaatatttgttacatagaaacgaaaatgctaaatggtcgttatttttttgaactaaccaaagcaacttcggggaaaaaaaagcgtggtgggtgacacgtgttccgctccggcgctcccatccaaaaccagggtatggaaaagccaaagttccagggccccggacgcaagattcaccaatcaccacctctcgagcgggcggcgcctcgcggctgcatctacaaatgcggcgccaccccggcgaacacagccgcgccacggcttccgcttccgcttacgctcctcctcttccccttctccgacctccgctacggcgagctgcacactgttaggcaggtgactactgtttgtttgcccacatctctcgcgccaactttttgactgctttgcccatgactgtcttggtttctcgtcttctccttttcctttggtccaattcgtgcgcgcgcatgagctctggcctctggggggacacacaccggccggccccagtcagggggataacagcgtctgtgtagtcgtttcgtcgaacacttgccgctcgcccgcggtggctctgcttcggaggtgttggctggattccgtgctgtgcactgcactgattccattccgtgctttcttgtccacgaaaatactgcctcacatgagctttgcatcttacaagccgtattaactaaaacgctctgcttgtttcttgccgttttggctacagaggaaagggtgatggcaatggcatgcttttctgcgagcaccaaggtttcgctcaagttcggagctaaggcgttcgcgaagaaccgcttgcctggctacctggactctgtggtatcttttcctgtttctcggacattggatggtggtctttgttctcccatcagggtggagaatgagaatcgcgcctatggttcaaacgtgattgttggggctctcaagggcagacacctcaacacaacactctcttcgactaatggtcacgtgaaggttcctggtaagatagtttaatcctacttttggggctgttctcgttcctcatatgaaatttttatctgttctcggatcaagcagagagggtaacttcattgaactgtttaccatgatgcttccctgaattttgtttggatttaaaatactgggcatatggttaagtttttagaaaaaaaactcaagcttgatgcattcggaggtagatggctgtgctaaaccagtaaaaacaagggttgccatttaactgatcacacgagaaaattcaataaattattatctattacttgggtccagaaaaggaattaaattcattaagtcatttgtggattatgcttttgaaaaatatttcactcgggcataaagaactatggacgcgatggtttcttaggaaaacgtcaagcttgatgtactatgaaataggatgctgtgataaactattaataatcagagtcaccttctaactaatcagtgtaatgaacccaagaaaaaaattctattaaatttgatgtgttgttttgtgacagaagagagggtaactgtactggtcattggtggaggaggtagggaacatgctctttgttatgccttggaacgctctccgtcttgtgatgcagttttctgtgctcctggtaattctggcattgctcagtctggagatgccacatgtataccggacatggacataacaaatagtgaaaatgtcatctcattctgtcgtaattggggtgttggattagtcgtagttggacctgaagcacctcttgttgctggtcttgcaaatgaccttgtcaaagctggaattcctacttttggtccttcatcagaggctgcagcattagaaggatcaaaggatttcatgaagaaactatgtgataagtacaacattcccacagcaaaggtactttcttttaatttgtgaagctactgtacagttattatgcttgacacataaaagtcaatgcaatatttgaatatatttagagctgcctgtaatattttcagaatgagaattatatctttctgatatgctttgttactggatactggctctcaacaagtcccaaactgtgttttatgttttagctcagagtgctcataaaccccattttatcttttcacaatttcaattgctgtaaatcttgccccttaaggatcaaagagccccgtagatgtttccatctgtttcaaaaattttaattactgtttatttacagagtaaacttaatctgttgaggatctaggagccatgttagatatttccttctattaagcatgttattggttgaaagttgaaagttgaaacttgattacttgtgttctgcatgtgcagtatcaaacattcacaaaccctgctgatgctaaacaatatgtaaaggatcaagaagcccccatagttgttaaagctgatggattggctgctgggaagggtgagtcgttgctatgactttagatgaggcgtttgaagccatagacactatgctgatagaaggctcttttggttctgctggatcacgtgtcatcattgaagaatttttagagggagaagaagcttctttctttgcattagtagatggagaaactgctttgcctcttgaatcggcccaggaccataaaagagttggtgatggtgatgttggtccaaatacaggtggtatgggtgcatactcgccagctccaatagtgacagaagaactgaaggaaaaagtaatggaaagtataatcctccctactgttaaaggtatggcagctgaaggatgtaaatttgttggtgtgttatatgctgggcttatgattgagaagaagtcagggcttcctaagcttattgaatataatgtacgatttggagatccagaatgccaggtttgtggtttttttttattaattatcattattggcttaacttagcatatgtttacagattataatatccagaccattatttggtcctctatatatttacaggatttatatgtacccaatttatatctgcttatttggatatcttgacgttagtaataatatgctaaactacctgcatggttatttggtcgtttcatatggttcatgcagaaaaaaatcggaatctcaagctaatatttgaatttacattcgggaaacaacatgcacaaacttttatctgatcttcaagtaacattttgcagaatgctagtagttctggtcttctaggtggtaaaagtcttttggaaatactaataacatattcattgcagtatcaaaacttcatttgttagtctctttaaagaaataaatatgaaaggccaactatctttttatgaactcattaaggatgtcatgttgacaaactaaacttttggttaactcatcttgttttgctcaggttctgatgatgaggttagagtccgacttggcacaggttctgcttgctgcttgtcggggagaactaggcaaggtttcgctaaactggtcgcctgagttggcaacagttgttgtgatggcaagtgaaggctatcctgggccttacaagaaggggactgtaataaaaaatattgatgaagccgagcaggtttctcctgcagtaaagatattccatgcaggaacagcctttgatacagatggaaactttgtagcagctggaggccgtgtgctcggtgttactgcaaagggcaaggacattgaggaagcaagggctaaagtgtatgatgcgcttgacgttgttgactggccagaaggattctacaggcatgacattggttggagggcactcaaatattgccatttggctgcacactgatgacaagagtcccccgaatctctgtaattatgtcgggtttgcaatggtaaggcaagcataagaatttgtcgcaatagatgctgttagccttgtgggtcagtgggtgcaagaagattgagtatggaagtataacttgcgtggagcagttccttgaccggggaacagctgatgtttggagagtagtttttgtttttttaagcttatatacttatatatgagtaccacttctggtatttatcacttattagtaaggaacaaatcctttgtatgcagcattctcatgtgcatttagttctacagtctatttagtcaaacataaaaataatttattggcacccactcattatcataataaaagcataattaacccttacctaatttaaaatatttttttgaatttcctatcacatcaaattttgcggcacatgcatgaaacattaaatatagataaaaataattaattacataatttacctatattttatgagataaatattttaaacctaattgacgatgacgtgactgagaaggtgaggaagatgaggccgagccgtatcacgtgctctcaaaaaatgtgaccgatcgcacgttacggctctcctataaggagacagagcaaataattgaagaagacagccggctggatttggacactacagtacatatgttgtttattttatttgaaaagaacctagcggaaatccataggaacacgtgtcgtttaaagtttggcactacaagtgctatcagatg

SEQ ID NO: 4856 - DNA, 8300 bp, Sorghum bicolor
  misc_feature (1)..(449): n is a, c, g, or t
nnnnnnnnnnnnnnnnnnnnnnnnnnnnnnnnnnnnnnnnnnnnnnnnnnnnnnnnnnnnnnnnnnnnnnnnnnnnnnnnnnnnnnnnnnnnnnnnnnnnnnnnnnnnnnnnnnnnnnnnnnnnnnnnnnnnnnnnnnnnnnnnnnnnnnnnnnnnnnnnnnnnnnnnnnnnnnnnnnnnnnnnnnnnnnnnnnnnnnnnnnnnnnnnnnnnnnnnnnnnnnnnnnnnnnnnnnnnnnnnnnnnnnnnnnnnnnnnnnnnnnnnnnnnnnnnnnnnnnnnnnnnnnnnnnnnnnnnnnnnnnnnnnnnnnnnnnnnnnnnnnnnnnnnnnnnnnnnnnnnnnnnnnnnnnnnnnnnnnnnnnnnnnnnnnnnnnnnnnnnnnnnnnnnnnnnnnnnnnnnnnnnnnnnnnnnnnnnnnnnnnnnnnnnnnnnnnnnnnnnnnnnnnnnnagagcgacgggcggtgtgctcaagggctggacgtagtcacgcgagctgatgactcgcgcttactaggcattcctcgattgaagaccaacaattgcaatgatctatccccatcacgatgaaatttcccaagattacccgggcctgtcggccaaggctatatactcgttgaatacatcagtgtagcgcgcgtgcggcccagaacatctaagggcatcacagacctgttattgcctcaaacttccgtggcctaaacggccatagtccctctaagaagcttgcatgtgtgacatctataccttcctgttgcttctctgtcctacactctccatgttttattttgcagctcatcctcataaagatgagaggggctgcttgcttctctgctgatgtaccagtgctcttcatgcatgcatgtgaaatagcaggcaattgggacttggaagactacaccatacatacatgccaatacatcatacatatcatggatacatgtaacagaataaaactcatcatcatggcttctcatatgtgcaattgtgcataccttacatacacacacatgccatacatgcacacacatgccaaaggatacaaacaaaaagtactagtagtgtagtacatatgctacagggttgtatagttttcagtgtacgtatatatgtttcagatgcatcagcacctttttatttataccaccaataaggaaactacaaatctgcctgttaaactcagcaagttcttcccacgatcatatatttaaatttgaccatatatatacggctgattatatatatcataccactagttagttagctagctagttataattgttgcctctatctatgctgatgagaagatgcatgtttatatatgtaataacagcgcgtacatgtgataacaacgggaataacaagcatccatccatctaaacttgcttcttgtacattttggcactaacactactggaatcaccatgcatcacatccataaccaaaacgcaaataaactgcagatttttggcaagaaaatgatacagcaaattaagccggattttgctgcactaaatttatacatacagcgaccggaacggaaccggccgggtttcttattcagtttatatatatatatatatatatatatatatatgtaaactgcagttgcactgcacacattaccagttcttggagacacaaaacacacagagagagaaaaagcagaggccataaacaaaaatgctttaagaatatatgtaaagatgtctaaatggctatatatggttaagcaagatagcaggcgctggtcatcagtggtattggccttttgcccttgctgtgctgtgccatctctctctctctctctctctctctctctctctctctctctctctctctctctacgctcatctcctctttttctctcctgctgcagccttgcttctgatcccatcccactctcccacccttcctttccgttgcgcgcattgcctggcctggccggcctgctattaagccaactttacccccctcacgctggctggagaacgcagaagagaggagggatcggaggaaccaaactaggagtagagtcccctttcctagcttgcttgcaagtccaagaaactagcagagagaggaacaaggtagagtagtatcgcttttcccttctaggttatctctttacatgctaaaaaattccagccgtatttctttctgcatcagttctgtctgtgatacatcgatcttgtgatccggtatgtagtttcagctagccagccgatcgatctcgagtcgtttgtactttctccctttgaggaaagaactccccccttttctgtgcttcgagttcttggaaggaaaaccatgccgtcggcttctcctagttggatgatgcttctttgtttatttacacttgatttccgttttttcctgctttctatatgtatgtatagtatcttctggggctgtctttccctgcgttactaagctttgcaaaggtttcaactttttgcttctgtgatgagatttctcctcccagcagcacggcttgactagatctttgatcttttatacatgggggaggaaaaaaaaaggcaatacgctatatatgcagttgcagcacacacatatatccagctcccggctgcttcttgcttttgtgatgataattcaacttgccctgattatattcttgcctacctagaattgtctaaagtttgtttgctagattttgttgcttcttttcgcatctgatcctttatcttcttctgagcgatccacgagttcttccagttgaaagaactgggtgaagatgagctttctcttcaaggaaaggaaaaagaagcagctccttgttattgtccatctcattactcatttgtccttgtttcgtgtttttttagcttcttttccccatctatgtttcgcgccgatccgaaagaaccaactcgtagatcttgtgttcttgtggctctggtttcgtttacatgatcgtcttgcccagcatcgatctgtgttcttttccgggccgagagaaactttaactgatcgagcctgccaggcatcgatctgtccagtcgtgagttcgtctgtcaaatcatggaaaaatttgtgcgtatattctcttctgtcatttctgtcgcctcgggcggattaattcttgaatcaatccgtgttctcctttttccctttgcaccccatgaaattgtttgccagtgtactactgtggctagatctatcaagctgctctagttcgtcggtcccttgaattctctttgctctcatgagaaaaaacttgctggctgctgctttcagctgcgatctccagcatggggcggggaaggattgagatcaagaggatcgagaacaacacgagccggcaggtcaccttctgcaagcgccgcaacgggctcctcaagaaggcgtacgagctctccgtcctgtgcgacgccgaggtggccctcatcgtcttctccagccgcggccgcctctacgagtacgccaacaacaggtgcgtgagatgcactgcgaatcttgcgtctcggcagccctgtgaatcaatgcttgattcctttttaggatgtcattgcatcattgcatgctcaagttatcgacttgctgttgccttgtggtgactttagatgagtaatcagcagaaaaaacaaatctgattcattggtactgcagtggcactaatttgggaggatttagttcttggtagttcatggatataagatatacaaattaggttctcttttttttggttcattcatacatgtgtcaagttcgtcttatgtgaccagtgatcgactgggagggcacatcgttcatcatatatatagtaatatacatacagaaccattttattaaaaatgcaaagtcaccaagaaaactagcacatgcttatataatcttactggatttttcgtctgtacgttagctaatataaagttgattgttatacttgagccacttcttttgagttcccatccatagatcaaaatgctataatggtttatcttgttgttaagccaccactttgtatcaaattggtgattgtattttgtcctgttatatcttgtttgtgcaaggacttgattgactgcatatgcacgcataaattggaactgtgcaaactgatgttcctttcatgcattgtttactattcaaaatgcatgttatttagattttagttttagaactgaattttgagtcagatttgtgtttttggtcagatttgttttgtaaactttctctccaccatttgttccagtgttttaattaataagttgacctcattcctctgcctagaggataaaccagatatttaattttcataattaaaaaaatgttatttgcattttcagagctaaagtatccatgctctctagctagcttaacatatctctcatttatcacacattattaggttcaatccaattgataagaatgcatttgcatagtgctagacgaaaatttttttgtccacacgtcttctgccctatcagatacctttacatgctcctcggtctctcacacacacagaacacaaaaaataaggagatgtcatatccccagcaggtccccctgttatcctttgtctgagaggacgtacgttgcaacgtacacagtactgacctgaccataaactagctgtcaagagtttccctttgctcgcatcctgctagtagcagaacgtatggtaccctcatctgcaaacttgcaatggcttacaaactcgcccttcctcctatattcgcggtgcttgctctcccttctatgatgcaaagtgtcaatcaacaacaaatgcacacgatgctccattcctctcctgtgcttcattctgccaagcaagcaagtttttcaacagcagaagcaatgatgatagcacagctgcatgcatttttattctttgcacaaatttgcaacgggacacttggtcacatgcattgactgggtacacgtttcatatactccatgtgtaaagtttcacttcataattaggccttgtttagttcccaaaaaattttgtaaaatttttcagattccccgtcacatcaaatctttagacgcatgcatagagtattaaatatagatgaaaataaaaactaattgcacagtttggtcgaaattgacgagacgaatcttttgagcctagttagtccatgattggataatttttgtcaaatacaaacgaaagtgctacagtgtcgattttgcaaatttttttaactaaacaaggccttaatggctttcacctgtttcgtgttactgttactgctgtggtcttttgtcttgtgaacatatattatgccttgttatttatcagtgtacaagagcacacagatggaggctgcattgtcacttcagtatactgacaccttgcatcttcatacattttgctattcccaccgaaaaccaaaaagttttcaagattcttcgtcacatcgaatcttgcggcacatgcatgaagtattaaatataaataaaaacaaaaactaattacatagtttgcctgtaaatcgcgagacgaatcttttgatcttagttagtccatgattgaacaatgtttgccacaaacaaacgaaagtgctacagtagcgaaatccaaaaacatttcacatctaaacaaggcctttgtttcattgttgattgatctggtttggctgcagcgtgaaggctacgattgagaggtacaagaaggtacacaccgttgggtcttcctctgggcccccactcttagagcacaatgcccaggtaaataataccaactcatgacaggctgacagctatatataaaccttactgttcttacagtaaaatatggtggtgattttatgatttacagttttttctgattcatacacgtactgagagtttgcataagattcttctgaaagtaactttgacattagtactaggctgtatgtagtgcatgagaagattaaacatatgtgcagcatgtcctaaatctatatactaaatctacattttttatgatcatgctgagctgagccctaccggcttgtgtcagaacaagcagtgaaatatgatagaatgaaaataaaatttctaaaagtgaaatagtcatacacctgaaacaaagtagttttcagacccctctggttactgagtactgactggaactgaatattccatttattacttaatttgaccttggatactgtacaaaattatgagatccatctgatcctttcctccaatttgttttatctgctgaagcaattctaccagcaagaatccgcaaaactgcgcaaccagattcagatgctgcaaaacactaacaggtacacgagccttacttgtgtagtctgcacagtatttactttctaacctaggccttgtttagttccgtgtagcactttcgtttttatttgacaaacattattcaatcatgaagtaactagacttaaaagatttatctcgtgatttacaggtaaactgtgcaattactttttattttcgtctatatttaatgctccatgcatgtaccgcaagatttgatgtgatggagaattttgaaaaaaatttggttttcggggtaaactaaacaaggccctactgataagaggattattgtgataagtgactgaaagtacgtactgcctgtattttgattctgtttctcccttgtgaaggcacttggtcggtgattctgtgggaaacctgacactcaaggagctgaagcagctggagagccgccttgagaaaggcatctctaaggtcagggccaggaaggtatgtaatgtataacatttgccaaaccatcttttgcaaactaatcataacttcataagctaagtgagatttaattcttcatatagtacataatctgaccatcaattccttcccaagttggttttgtttcaataattcttcaagttctgatgtaattgtgagttttttgaggcaaatttaattgtgagttcgtatgtcagactctgattgctgaattattcttgtttcagaatgagctgctggctgcggagatcaattacatggccaaaagggtaacatatatatacatgtcacctacaaaaacctagatgtcattcattttagctaatcctgtttggattcattcattttgcatcatatcttgtctgcaggagactgaacttcagaatgaccacatgaacctcaggaccaaggtatgcttgttgtcactgtcagaaacaagaaccaacgcttttctttttgttgcatatatatagcctagcgttgaaagtaaagaaaaaactaagtaattaatagtcttgagaattaaacatgcgtgtgtggtaactgaacattttgtcaattgtcttgtcagattgaggagggagagcaacagctgcagcaggtgaccgtggcccggtctgtcgcagcagcagcagcagccaccaacgtggagctgaacccattcttggagatggataccaaatgcttcttccctggcggccccttcgcgacgctggacatgaagtgcttcttccctggcggctatcagatgctggaagcgacggcggcacagcaccgccagatgctcaccactgagctaaacctcggctaccaactggcgctgcctaactctgacgctgccaacaataaccctcatcagttctaaaccgcatgcacgagaagcttttcaagcgaactgtgtgacccatggaagctggctgttgccctctagctgttcttggcttccataaccttattgtgatgtgtattgttgtgtacttgtgtgtgattctccttgctactctactgatggagaactaaacctaatcgattagacataatgatcaaatgctacagcatctatgaggctgcgatcaggttaagttaaaaacatatatactgattgcttaaatgggtttacgacaatgctaattgttgcttctattggctcaactttcttggttccagttttggacatagtttgtttgacatggtattgtattatattctgcacacaatactccacagtaagaagtaagaatatttcaaaagtgggaatggtgtagtgaaccgataaggaaattattattctttttgtgaaattggttctagaagtgcagtttgtgatatagctatacatatgccaataaaattatagatttatgatgcgggttttagacggagtagttttggctttttgggatactttttcatctattatgtagatagtttgtgattttttttttacattttgatatgttgcattagtctaatatgagtaactttcatgatacctcaaaatacatgttcatacaaaatatttagataattgtttcaaacatctagagtttttgtttgtacatgagtaaattctattgggacataaaacctgttc

SEQ ID NO: 4857 - DNA, 7324 bp, Sorghum bicolor
gttcgtggattgatgtgcaatctgatggcttctgaagttcgtgatattttacttctggagtgctacgtgaccaaggatatagagttcatgttcgtttgcttctggatgatgctgcgtaacctgttgcaaatgtgtcttatggatgatgccacaattgatccactctcattttgtgttgtatttaatttatcagttgtattaatcctgccatagaaaccatgggttgggagagatggtttctaatagacattaattgctctatttctctcttgaaaaatacaactagaaactctccattgggactgcccttagaacctagaaaggtgagataaatcttgattaattgcttgttttttgtagcattaatggtactagatgcttcatttgtctcaagtccctaagggcagttccaatggaagaaactattttagtttctaaagcataggacaatatgccacgaaactattcttcacaatgcaaaattttattataacatccaggtaaaatattaaccaatcatgcaccgtgtcccttattctcctcccacgatcctttgcgcacaaatttttttccgttcccaggagaaaggcagtgctcaaagccgctttcctatgtgcgctacttgcccgcttatgcctttgcatgacgacgtgccatgccgggaggggaagctgaagcacgagcgccactgccgccacgagctcgtggaggaccatgccgagatccaggtgcgtgccaaccaacaggacgttcgcgagggagatgcgatgggatttctcgctgccgacggttgatccatggtcgttgcctcgcatgaaacaagcagcatgccgctaccatcgcctaggcagtagcccgcgccaccgtcgtgcttgccgcaaagaaggccaccatcgtgcgagtcgccgctgtcgtgcctccgtaccgcacaggctgtggatccgtgctggtcgtgcctccgcgcctaggcaggccatgcctccgcggctccgccgagccgcaatcgtcgaaggctgccgccgctagctgccgcgttcgccgccacgatggtgcgcaagccgccgccgagaaggccgcgccgcacaggctgcgctcaccgagagagccaacacacgagggaaattgcagcggtggcgcaatggatgcgaactagaggacgaagaaacgaggtgagtctccccatcgctagttccatcatttcttagcgtctcggtacaagatacgactcggtttcatgtgaaggaaacggtttctttcatttttttctctctcttcataataaagctagtgtcatatcagcaaattgctgagttgtcatggtagggcactcacaatgcaagactccgtcgcagagtccaagacacttaattacatattatttatggtattttgctgatgtgacagcatatttattgaagaaagaggtagaaaaaataagactccaagtcttatttagactccaagtccaaattgttcgaggtaataaataactttagactctatgatagagtctgcattgtgagtgccctaagggaatcgctttatagtttcatcaagtcaaaccatcataagtttgattaagtttataaatagaagtattgaaatttatgagataggtatattataaattatatattactcaagtccctaaatagagtacatgataaagttggatggcagtaacatatataaatatcagtattttttataaatatagtcaaacttataacggtttgacctctatcctgatttaatcaaaggctcaaagccataggtcattctttggacatatatggactggctttgcgactggtcaacaacgtcagtacgtcacccgcatcaattccttgccaggagcgcgtccctgccaaggccatatttccgtctctaattaatcaagtagtcagccatgtagttgtagccacgcagctctatttaaacacactctcgagagagtcccggccgaactgcaacaccatccgtcgagagctcacatagcaatggcctgctctgccgccgcagcagcccttctcctgctggcctccatggtctgctgctgccgctcggcgccgccggcgggtgcgctcgtgacgcgtctccccgggttcgacggcgctcagctgccgtcgaagcactacgccgggtacgtgacggtgaacgagcatgtcgggagcaggctcttctactacctggtggagtcggagcgcgacccggcccgggaccccgtcgtgctctggctcaacggcggtcctggctgctccagcatggacggcttcgtctacgagcacggtgcgtcgtcgtcgtcgaccctgctgtcctccgatccagtgtgtgctattgttgtgtgatctttttttcctccagccatcgatcattgctaggtctatatatgtggacgaacaaggcaaaggtaaaaacttctcgttcgatgtttttcgaggcctctttggatgagccctggcctgaggattctgcttgcagcatgtatagccacacccacgctcctatatatccaccgtcgtcttctcttgcctgttttaccaggccatatcgataaaccagtagatgtagatttgcatatttatcctctatttgacacttaatataaatgaccaatcatatactattgttattactctaatatgacaagattaaatcatattgcagagatatgttatccattaattattgtagcatttttttcaagtacaagtagtttcgcttttctagaaaacctacggtagtaagcaatacttaagccctgcttctgtcgttatgtttagtactctatatctgattcagagaaagatcaaagcttgggtgtgtcggacattcttttcatacacatcttattgttcaatgtttcagcacatttgtcatttgttttcttttatatgttcaatattaatatcataatcgcagccatttcatcatattacacgtggccaatttttctgtcctatccaatacggattttttttattttaaccttttttaaaactatttttaattttgatacagaaatttttttaaaaaaaactaacttctttggccgcgcaacaagccatggtgcgacactctaacactgccacgccatgcattctagcgcagtaggagcgctgacgtggctcccgtgtcaaagttgaaaatagttttcaaatatggttaaaattaaaaaaatctccaatactggatgtgcaacaagatttagcgtgctggtaaaattaaaattcttgttagtattttgttccatatttgaatttatatctgatttaattcatcacggatatctttttttgtaacaacaactacaagttgtgtgctttttcctattttggtcttatgcatctatatgaccacatataaatgcttctgtagtgtgtccaatgtacgcgcatgctcaccaattcatcttgatctttggatgccagttaaattagtctgtatttgttttgggttcaggaccattcaactttgagtcaggagggtcggctggaagtttgccaaagcttcatctcaacccttatagctggtccaaggtcggccatttccatttggtatcctaagtaataggcagaaattatctcgagttctatacaaagtagtgaaattttccttgcaggtgtctagtgtattatacttggactccccttctggtgttgggctgtcatactcaaagaatgtttcagattatgaaactggcgatcttaagacagctgctgattcacatacttttcttctcaaggtatttttttataaggaagattttattaattttcaagtgcattacattgaggtgatacacataaagatgttagttcatcttggtgcagtaatgtatcatctttttgtggaacaaaaagctgagtttcccccactatttttaaccagtggttccagctctatccggagttcctaaaaaatccattttacatagctggagagtcttatgccggagtttatatccctacccttgcaaatgaagtggtcaaaggtgttggttttgagatcataatcacttaagcagatattaattgtttctatattattattcgtgttgctaacgaattattctacaggaatccacaaaggagataatccagttataaacttcaaggttagtgatttttcttatgttgttttctccataaagtgagtatgtgattaccattcaaatctatgaataagaggttgcttccttggacatttttgtcaagaatgaatggaggattggaacaataaatactttgtgtgtggtcatttttcctccttgtgttctcttttcctttttacttgatcttgattagctgaaaacattgtaagaatttggctatatgtggttatagagtgaaaaaagaatttatttttctaaaaaatgatgtagatctatgaattaaaaacagctttattttgtatgctcatgttagggctacatggtcgggaatggtgtatgtgacagcgcctttgatggtaatgctcttgtaccgtttgcacatggaatgggcctaatttcaaatgatatatacaaggtatgttagtacttcgactgaaaccatacctctctatgaaatttcctttttgcattgatttttagtgatggactggtggtattagaacacttcatttgcatcctttgtatatgccaaataatactagacctaataagtcctttgaattagacccatgttctttcaattaaccaccattactattcataatgcagcaagcgaatacggcatgtcaaggaaactactggaattattctgacagtggagaatgcaccgaggcagtatcaaaagtcgatacggtaaaccagtgacactttctagtaaaaaaattgatattgttctcatgttatatattatgtgatctgtgtaggtaatcaatggattaaatatttataacattcttgagccatgctaccatggcacaaataccaaggaagtgatctcagaaaataacagaatacctcaaagttttaaagatcttggtgtaactagcaggccccttccagtaagaacaagaatgattggccgggcatggcctctgagagctcctgtaagagatgggcgcgttccatcatggcaagagctagccgctggcactggatcatcagttatgtgtatggtgagcacaaacacaataacctttgaaccttttatgttctcttgtgatctattggagtgttaatcttcttgagagattacattttttctcctcatcatacaatgcactcagttttttggtacaaagtcatttgtggcttccatcctcctcattaacaaatttggccactagtttctatcaaaatacaaaaagctacaaacaaatagtgaagcaatggacaaaaaaatcaacatgaatctaggattaatttgttcatgtagcaaatctaggtagtatatatgtttctgtatagtagtcaatgtgcacaactttccactgtagactacaggttgactaaattttggtatatagttattctaatgtagtagtgtagtgtaggagtgatactaatactgcgctatgtactcctttcatttcatttatcttcatcttctctgattattatattgtataaggcatatcttccaacttaagatttcagcgatcttgtctggttcccattccttcggatggatgcatttttcatctcaaattagagtatataggagttagtttttttctcccgaaagaagctggtccattattgtcctcattacttatgtatcatgtcttggttccttattaatcttcagagtgatgaagttgcaacagcatggctaaacaatgatagcgtcagatctgcaattcatgcagaaccagtatgatagccatacactaatcactttttgcttgatgtttttaattttagaactttccatcttctcaacatagtttatcatgcacatgttaacaggtcagttcaattggaccttgggtcctatgcacagacaaattgacatttcaccatgatgctgggagcatgataatttaccacaaaaaccttacaagccagggttaccgtgctctcatttacaggtactttaagaacacaaaatatgctttcgattctcatatattcttattaatctcagaagaagctcctattatcattgatatatttcatttaatttgtgttttagtggtgaccatgatatgtgtgtaccttacactgggagcctagcatggaccacatctttaggctatggagtcatcgattcgtggcgagcgtggttggttaatgaacaagtttctgggtatttgacaaacaatgatctcatcctatcctaagattttttgaattgttttatttatttatcggttttatcctagaaactgattttttatataattcataatcaccataatataatatttcttttgtgagagatatattcagttaaattattgtcttttatattttccataatttcaagaaaatgtttttatgtgtcgaggaaagaaaataaggacacgcgtatctttgcttgttatactcctcaggtacacccaaggatatgaaaatgacctcacttttgctactattaaggtactacagcttccaatttgtcaaataatcccttgatgtacaaatgagcatgatactagcctaccaaatcaaacataaattatgtttaatatatggtcacattaatgaaacacaaacaccaaaacaaatcgaagctagcttctagattaggttgtcattattaactgtcatgttgtttttctcgcagggttctggacatacagttcctgagtataaaccaaaggaagcatttgctttctacagccgttggcttgctggttctaaactgtgaagctcatgttgcagctgctgatgtggggagccatatttctgttcaaagtcatgcattgaatcaaatagagaacaatgtgaacaaaattggttaacccatgcaacaaataagaggcagacaaaggatcaaagtacctagcgccaactacaatgttgcgttcttttacgcaaaatattatatcaccaatgcagatgttcacatgcattattgctcacacctttatggtacggtgtgatcaaatatttgtgacaattttcatctgttttgaaatccaaaaggtacaaattaaaagtctgctatattttggcttggatgcaaataagtttcggatagtgttgttaaataactccctccctgtcttgggaaagatacatgaaagattggattttatgaggggtcttaaaatctatttgtccaaagttctcatctaagttcacaaactctaaattatatatttgatacttgggtgaagtctttttttttgccactcaagtatagtc

SEQ ID NO: 4858 - DNA, 10356 bp, Sorghum bicolor
ttgtttagtttctaaaaaattttgcaaaatttttcagattttccgtcacatcgaatctttagacgtatgcatggagtattaaatatatacgaaaataaaaactaattgcacagtttggttgaatttgacgagacaaatcttttgagcctagttagtccatgattggaacaatatttgtcaaatacaaacgaaagtgctacggtgtcaattttctaaaattttttgaactaaacaaggccaattaactaccgttcttcttttggctgtatttataaggatcattaatatgcatgtcagcaacaatgttgaacaaaagagtagattaacaggcctaggtctccttgacaaagctctttctttatttggaaaaagtggtcaatctttacattaattgctacacttgcacccgtgataacgattcccatttgatccgatccacttgagcgaaaaaaactttcaatatccatccatcacccatgcatatacagatattattagacaccacgagtgccccttttcctgccctcctcacacacacacacactcaccggccatatggtgtgttgctggtgcaccgtggccactactaacaccacaccactcctcccacatccgacccgtccatatgatatcttagcttgctgcttgttgcacggtgcataaccactatctttgcttcgcgtcatggccatgccgtatcggcctatcttcatatcgtatctctccagcggtcgatagacgttgccggatctcgagcctgcatccactctcgcagctgtcatcaacccactcattgggatgggcgtcacttaattgacctctcgctgccggccatctattgtttgtttcactcataagttatgactggaagtattgttcgcagatttattataagagaaaaacactgctgacacattcatcagcagataagctcaagggaacaggcacctctaaaccctgattattcctgctgctcacactgtttgttctccgccgggcaccggcagttctaaaccctgattattcctaccactgaaagttgaaacaggcctttagtcctgggctgcgagccgggacaaaggtttcaagactaaatgtcccacttttagtcctggttcacagatgcggtactaaaggggatatttagtcccggttggtattaccaaccggaacaaaagggcatgccactaactgacgtggcgcagccccttttagtcccggttggtattacaaaccgggactaaattttttttctttttcttttcaattcattttttattttggttttcaattatattgttttccaatttattcttcactgctattatcgtatacgttacacctatactagagcgttattattgcacacacaaataaagtatgaaactatcatgtatatatatatatatatatatatatatatatatatatatatatatatatatatatatatatatatatatatatatatatattatagagctatacatatacgtacatacacattacatttacaataatatacaagtaatcaagtgttcggccgccggttaaaggttgtacaaatgtttgccctacactcaaagcttctacaagtgttcgttcttgtttgcactattcaattccaatctagggttgtagtggaacttggcgtcttccggaatgacatcatctcagctccatacttaatctcagctcgccggagaatattatgccatgcatcgacaggagaagagataacatatatatatatatatatatatatatatatatatatatatatatatatatatatatatatatatgaaaccttgcgagagaagcacagaccatattatataccgtcatacacatggatggtgttggaaaacatcaactgactcgcttctccttttgcaaaatccgtcacctggtcaacatatcctggcgtggcccggccgacttgcattgggtgactcaagtcttagtgggtaggctgagacggtgagaattccaacacacacacacacacactgacgtacgatatcgaacacactgacacaacacaaccgccgggcgccgccggctttgtcgtcaacgtcaccattccttaacacactctctacatacacgtcgcagccggccggcagctcatcttctgtatttaaacgcgctccatccattccggtcagggcacggagtcgtcactcctagctccgcgcgcaccgagctcccacacactctcgcagcaatggcacgcggcggctctaccgcggctcctccacccctcccgccgctgctgctgctgctggtggtagtagtggtgtcctcggcctttttcgctcgctgctgccacgccgcgccgccgggtgcactggtgacgagcgtcccggggtacacggcgggcagcggcgcgctgccgtcgaagcactacgccgggtacgtgacggtggacgaggcgcacggcaggaggctcttctactacctggtggagtccgagcgtgaccccgccaaggaccccgtcgtgctgtggctcaacggcgggcctggctgctccagcttcgacggcttcgtctacgagcacggtgcgtagtacttagttgtgtccgatcgatccgtcgtcgacgacatgcacgacgacgaccggtggcctggtcgtcgtgtgtgtgcatgtcgtcgtcacgagtttttgtttggccaatcgtcgtggttgcttgtggggcatgtcgtcgttcgttcgtgctgtggacggaatcgagctagaaaaggcgaggaagaaggtagcggtggtggggtgccgatgacagcagctggttgctgcgctgttgctttctggagtagaagaacattaggcatcgtcatcgcacaaagtagccggacgcactggatcggatatatcacgtcgctgtcttctgcttctggggaagctaaactagtatcatgatattctctactagctactagtgttgtctatatttgacatctctccatcgcatttttctttcccgctttcctcaccatgcaactttttttttccaaccaacttgttagagtaaggaatctaataaagatgtagaataattgagcattttggggaacaaactttctttcatggatggagtggcgagaggctgggctgtgaagtggatgagaccaaatttgcctgacgtgcagagttatgtagaatatggacgtgggataagtccgcggatttggaacatgcggttttatagggatcttgaaataaatattattggttcaacaatgaaggcgattggcggatgtgtagtggggcaccaggagccaaggtagggttttgggattatgcatgcttagggttgatgtcttgatgggaggaaatattggaccacactactagtggaggttgtttagtgtggatggtgtggccacgcgctaggggttgctaataaggtggtgaaggtcgactaaggcatcaatcatcttgagagtagttagcctggcagatgacaaatccggtggcaggagccacaagacaggagaaatgtggggttatggcgatatagatatttctagaggctataacaagtgacgaaaaaaggtagagaaggaaaaagggtataccagatggaatatgaagaaaatcaatgcaaacgtcccgaatttagacaaaatttgggcaaaaaattccttttccaaagcatagagaaaagcttgggtgcttataataatttgatacacttcatatttttttagtgttcctttgatatatatgttcaatatttgtattcttatcttatctttgtaaagaatttagcgctcttatgagtagtgtcttagcgcacgggacccaagaggggagtagtaaattggatcactaataaaaaaaagttaacccagtgctccaacacgatttatgctagataataaccacttcatccatacccataaagaaagtcatcttcaaaaaggtttgggtcaaacattgagaatataaatcataaaataacttttaaattgttgagtttggaaatgtgaaaacatacgaatagatttgtcttgaaaaatacttacatacaaatatacatataccactttttgataaatattttatataacaaggagtcaaagttagactttggagaccgtgtcgttgttctaaacgagtttctttacatgtatgaagggagtactaactagcaagaagtgcacctagaaattatctagtgtctctacctacccattcacaaagcgttctgcaacctatatatagctaatcatatcatctatcccaattaatatagaaaggtagaagacacacaaacacataaaacataagcgacgtaagtaaatatcaagtgagcaaagagcaaacttcaaagaagcggcgttaccaatattagagctctcgaatatgctctcatcatgagaccctcacctttgggacgccctagtctcctaatcacattgacgcagtccactgtggcgcttcgtcatcaaagggtttccttgtcgttgacatggccggtgagtcactaggctccagcatgcaaagagcacacaactctacctctcatactaagtcctatataggcccttggatcaagcaataagtgtgagcctaagcttaaatatatattctaacattttcgcaacattcatagtgggaatgtcacatacaagcctaaggttgtaactcgaagagttatcaccccttgcagtcataatggtccattcatcgtagatgttggatgtagtgaagctaaaatgttactcaagcagggcaatatcatgataggcctttgtgcgtatgttgatgttctcgaggatgcatgtcatgtgtatgatagttgtggtcaacagagatgtctaagttttcaaagatgagttggccacacaagaagccttggatacccaaggtgtttccatgggtatggtggttcataggagatgtcaccatgaataaatgtgatgcattgaggcagccgttgagggagagttgatgccaagggtgtagccaatgtcaccatggacgaggtatgcactaggtttgtcatgcctacaattgtgttatggataatggcacctgttggtactgtgttgccaatactagatgtactagagggagattctcaaccatgcatcaacatctaaagtactagcggagaaagccttcaggatgagtatagtgtaaaaatggtagggtagaagataccaatgcattccatggttgttggagtagatgaaatgggcaaggaatagcaaggaggttgtactggacaaagtgaggaggtaggtctaggtgatttgttgcaaggcctggtgttttggatgccatgatagtgatgctcaatgtgaagaacatgaacatcctactaaacacattgcatgtgatgtgcacaatgtcatagccacatatgtagtttgtgtcaattaagatgaaattgcacggaataggtcaattaagatgtaattgccaataatatgtacgattaatgacgacgatgatgtggcatggcaataagatgcagtagcatttggagagaggaggtgtgtagtacttgatgacaaaggaggcaaggatgagctagcattgagtgatgtgctagaggcaatgttttgctaaacgctaaacagttaacaatcagtcacctgccatttagccattattcgggctaaacaacccattaaacgggctaaatggtcaattaaacggactaaatagctaatttaatggaaacgatgtaccactgtgtaacgtttacacaacgtttaaatggtctaaatggtcgtttatgtgaacagtggctagaggtggccaataatgtagttgaagccgatgtcaatgtagaggcatgcaaaaatgagggcttcagaactaaaatgatgttagaccgggaaaacaataagaaaccctaatcaatgattagtgggagagaaaaccctagttatctgaccaagaaaagactctctagggtgatcattcaacacgtctggtggcgagaggcctaggtatggtggacctgttgtccatggccaacattatcatgggtgatcttgggtgggtggctgttggggggggggtagtggtggaaccagaggtggccagcagggccacgcttctctaacacgccaaaatatttggaaccccgccattgcaagtcctcttcatatcatggttctatcggtctctagattgtctccactcccccacattcaaagtctaggcaccacattcaggtcttgacgaatcaacaacaaactactatccattcttgatactaaagggaattagtgtatgcatagcttcggccaacacgacaactagaggtaaattaataaaacactatggagcagctggtaggtgctcactgctcaggcatggtacaattctgacccaagctgcatgcaccctcaagcaacatgctgacccatgaagtcactgtgtttgcacgcctccctctctagggggggggcactgttgcgcaacagaggatgtataattagtggcatgagcatatcaagggcattgtgtagcaaaataatagagtttatggccatagaacctgaatctcaacttatgacaataagtagaggaactaactcaaattggagacgcctatacactctaacatctttcatcccaattaatgagtgtttttttggggtccaggaccattcaactttgaggcaggagggtcagctggaagcttgccaaagcttcatctcaacccttatagctggtctaaggttggacatttctgttagtcctaaggataaattatctggtgttcaagatctaaactgagacagaatagtgatgtttcccttgcattgtaggtgtctagtgtgatatacttggactcccctgctggtgttgggctgtcttactccaagaatgtttcagattatgaaactggtgatcttaagactgctgctgattcgcatacttttcttctcaaggtaaatatatatgttcttttgtgttgggcacattagtgaatttatcattatcattgataatctttttatcgaacaaaaagctgatcagttccctttccgttacatttaaccagtggttccaactctaccctgagttcttgaaaaatccattttatatagctggagagtcatatgctggagtttatgtccctaccctttcacatgaagttgtcaaaggttttgtctttgggatagtaatgatccttaaactgctagttattttgatattcttgttactgacaattattttacaggaatccacaaaggagataagccaactataaactttaaggttagtaatttttattatattatcgctgccttcatgggaacggcgaacatggttaccaaggaaatatatataataatgtttaaagttttgttgtattcttgtgttagggctacatggttggcaatggtgtatgcgacaccgtctttgatggtaacgctcttgtgccatttgcacacggaatggctctaatttcagagagtatatacaaggtacatcagtatgactataccccaacggatatcctcatcctgaaataatttctttaattacaccatgatgttgtattgattgtattggaacacttcattcatatcctttgaatacacaaaatacttctaaatctttttgtgtccattgaaacatacatatgttctttcgatttaccataatttctatacaaaatgtgaaggccggaatgtttcattcctttatcttaaaaaaagaatttctatacaaaatgtaggaagccaacactgcatgtcaaggaagttactggaattctagtagtgcaaaatgcgacgatgcgctgtcaaaagtcgatacggtaaacctgacactgtctagtaaaataaagaaatactatattctttgtattatatgttgatgtttttgtgtaggcacttgatggattaaatatttatgacattcttgagccatgctaccatggtacaaacaccaaagaaggtatcccacaaagtaacaaacttcctccaagtttcaaagatcttggtgtaactagcaagccccttccagtaagaaatagaatgcatggacgggcctggcctttgagagctcctgtaagagatgggcgtgttccatcatggcaggagctagctgcatcagttccccgtggagttccatgtatggtgaggacaagcacactaaccacccccactataactctattatctgtcataacattaatgttttgctccagaggttgctccttacctctttttgtactctctcattttctttacagatgtcattggttgcttccatcctctttacttacaaatttgaccatagtttctatcacaatattgaaaggtagaaataaaaaatatattcatgaagcaaatctagatatgcttagtcaatgtgtaaaacatcccactatagatcaccatatatgtatgtgagctagcatcgtaaactcgtaatacagtaatactaaaatgtgcaattcaacacacttatttagttcatttatctttatcttctccgattatactatgtaaataaggcaggcacatcttccagctttatcttcgctgaaatatagaggtgtaattttttttgtcacaaacaaagcatgattcattttatcccattttcttatgtaccttcactgtcttgttttcttaattttcagagtgatgaagttgcaacagcatggctaaacaatgataacgtcagatctgcgattcatgctgaaccagtatgatagtcatacactaaataaccaccttgtacttattggacctattgtaaagctttccaccttctaaccatagtttatcatgcacatatattaggtcagttcaattggaccctggcaattatgcacagataaaatagattttgatcatgatgctgggagtatgataatttatcacaagaaccttacaagccagggttatcgtgctttgatttacaggtactttaagaacctataaaattatatgatttaggctcttacatttttagacccagaaaagttgcggttatcattgtgatatttcttttgcaattgtttcagcggtgaccatgatatgtgcgtacctcacactgggactgaagcatggactgcatctttaggctacggcatcattgattcatggcgacaatggattgttaatgaacaagtagctgggtatttgaacacacattgactcttttctcctaagatcttcaaatcacaatatcctagtggttgaattattcttcaaaataaccaacaaaagttaaaagttctttcataagagaaatcttcagttaaatggtttatttatgttccattgtttcagtcaaatgattgtatgttcgcaaggaaagaaattaaggacatgttgctctactcacatatttttgcatgttatactactcaggtacacccaaggatatgaaaacggccttactttcaccacgattaaggtgtggtacaatttcaaattgaactttgtcaattaatccatagattcacaaacatgatactaccctgccaaatcaaaaacaaattacatctaatgacacatttttgaaacacaaaaaaacaaagttgccttttttatctatcctgtttgttcctctcgcagggttctgggcacacagttcctgagtataaaccacaggaatcattggctttctatagccgttggcttaatggtactaagctgtgatactcatgaaggagctcctgacgatgaggcctatttttgtgcaagttcatgtagtactgaaccaaaaaaagtacaatgtggagaaattggataaagcatacagcaatataaggcagctaaaggatcaaagtacctagcgccaactacaatgttgcaatgattcgtgcaaatattatatcaaagtaccttacatgcattattcattagttcactgggaccaaacatttgtgaaaaatttccttgatatttttttgaatcatagtataaacatagaggctcatatacatgatcatgcgcactctacttttatgaccaccttcaagcctaattggtaacctagacatatgcctctagccagacttatatgctgcaactgtctctgtttggtaggttgtatggagttttaatttggcctgcgatattctagtgcaagaaaaggcatgccctgaggttgcaccaaaaggaacaaaatttacttgccgcataggtatgagcaagctgatttttgaggcaaggcataagatggcagagttggtgcacgcgactggtgccacccaaaattggtgcaattaggattacttaccctactgatatatgtggaaggtgctggtggcttcctcccttcgcactcattttttcttgtctctggctagatagtcgatttttctggctaatttttggtaatggccattttcctgttgg

SEQ ID NO: 4859 - DNA, 5469 bp, Sorghum bicolor
caaagttatttttagataatgtgtacaaactccatggtctaccaaaggcaattatttctgatagagatccagtattcaccagcaacttgtggaaggaattattcaggttgactgacacacagcttctcatgagctcagcttaccatcctcaaacagatggtcagacagagcgtttgaatcagtgtttggagggattcctcaggtgcacagttcactcttgtcctaggcagtgggccaaatggatttcagtggctgaattctggtataatactgcctatcacactgccttaggcatgaccccatttgaggtgctctatggacagagtcctaggcagttgggcattgaaaacttgcaactgtccacaatacctgatctggagaaatggatgcaggaaagggagttgttgactagaattgtgcaacaacaacttcagcgagcacaacaacgcatgaaggcacaagctgataaacatagagtagaaagggaattccaaccaggggactgggtgtacatgaagttgcagccgtatgtacagtcttcagtggcatccagatctaataagacgctgtcatttcggttttatggtccctataaagttctgcaacgggtaggagctgtcgcatacaagttggagttgccggctgcaagtaagatacattacatgtttcccaactgaagaagcatgttccaaaagacacggtagttgctgcagaattggattcagtggcgactgatccattcatggtgttgcaaccacagaaacttctgaaatccagagtgattcagcgaggagcaaatatggtgaagcaagtgttggttcagtggacatcgatgactcctgagatggcgacctgggaagatgaagctgatataccaagacaacaatttcagacttcaacagactgaggtcagcctgctgcttaaggaagggggaatgtaacggatgacaggttggcccattcgctgaggcggttcgtgatggttgactggcaacagctgttgcagtcgggacaggctatataagccgttcctccctttggttcaggtagcgaactttgtaacagaaatactctagaattagttccagtcattcgagtgtaccagttcatctgctcctgtacacaaaccttgttacaaattcgcaataaagatacccagatttcctccaaaagccaccaaatcgaagccagttcgtcacacagcatcaccagcttgctctctgtttgtgcatataagggtcttccatgcccaatacacccaaaaatctgcatgtggaccatacctttttattagattgattgaatcgaagtcaattgtcaatcgccaaatatctgcaagaccttatatattctggtttgtatgattgcatgatcaaaatgttttgttagagcttttctttaataacctttttaaaacggtgcaaactacagagccatcgcatgcaaaatttttctctaaggtggttctaaattagagcaaggcttttgatgtttgtcttgagaaaagttatttacatcgtaccatatcaatgtttgtcttgagaagtagcacgaacagctgctggggaagctcaacgcagctcgactatttctttgtcaaaaaaaaaaggcagcaccactatctttacacgggcttgcgtgtactgtaaggtgcagatcgtctgttctgtataacccatgcgtgagcactgacgcatgaacagataaagatatatattccctccgtctcaaaaagaccgttgttgttgactttcagacatcttgtttgaccatccgtcttattagaattttttatataaatatcatctattttaatatgacttatttgattattagagatactttaataataatttacctattttaaaatttgtaccaaaaatttaaataagacgaacggtcaaacatgattgatcaaagttaacaacatcggtttttttgagacggaggaagtactatatacaaaagcatcatgaggccatgccatcctcgagcaaattaaagtctgcctctgttcttgctctactatttgtctcttcctctgttatcctctgcaatcagaatcagttgtacacactcacatacccacccctgtagactttctgggtagcttgtgggtcccagctggaagtcactcagacttggcaaagaatcgtcttccttctctgttgaattcaactctgctctagcagtgccagtctagctctactcaagggattaggagcagaaatcggagacttgagggactcacctgctactcaagagtcaagagtctacattatcttggcttcacctccacctgttagttgctgatccaggaggaggagacgacagccatggcgacggcgaagcccatcctgtacaacgcttggatcagctcctgctcccaccgtgttcgcatcgcgctaaacctcaaaggtgagtaggtgactctagcacttcttgaaactctaggctctgaaactggttagattgatcttttggttggttgttaggcataaccgatgagctcttatcctcttttttcagtctaagatatatacttcaactttcgcaagaattagatgcagattcgtctatttttgggcaaattctgaagtttgttcagttagggctcagggatgactactgatgctagcaattctgtatttcttgatttagtaactgtaaaactgtgaatagttagttgttcagcaaccccaagaatattttgttttcaagtacttgagcactacttgtctattgagagaacaagaaaggctatatgcaacacatttgttttagtatgtgctcacataggtcttgtcagtgatgcttgtttgtctttgtttaacgaacctgatgctatgtccatttgtgcaaacttctttcaactaactaattcaaggtgtgatatatattaaatgctttattattctaaaaactaaaagctaatttcgtggcttttttaatcatgaaggtgtggattacgagtataagtcggtaaatcccaggacagatccaggtaactgcaacgccttgacacatttgtgtattgcagttgacatctcattctcgcgtttacaatcaatggggacacaaatgagttctagaaacttcgatgttacttttttgttaaagttcatggtttaatatggcatttccattactatgtcttccctttcgtagattatgaaaaaatcaatccaatcaaatatattccagcattagtagatggggacatagtcgtttctgattctctcgctatctcattggtgagttacaaattttgcttcagcagattttgattgtgcaattatgtatatgttctttggcatgccaatgcatgcatttattagtcactaacaagctatcgcattgaccagtatttggaagataaatatcctgagcatcctctcctgcctaaagatctcaagaggaaagctcttaatcttcaggtcgtgtccagatcaaaatctcgttgtatcttgttcacagaagcaaaataaaaatctgaccaactatttgtatgtggggaacctatatttgtatcttgcatttaccttttcactatggtatcatatatacttgctatatattgaggatctagtcaactgaagaggtcaacactcttatcatcatgtggcatctcctttccaatgagtctttcactttcttggtacagattgcaaacattgtttgttcaagcattcaacctcttcaaggctatgccgttattgtgagtattaccaatacctagccacagctgatgagacttttgggcatgtacaagatctatttacataactactttacagggtctgcatgagggtaggatgagcccagatgagggccttcatattgttcaaacttatattgacaagggattcagaggtgtggtttcatgaaacttaatgtttgcacagtaaaattgtctcttctttttccagtacatagactcaagttatgttttcaaatctagcaatgcagctgcgttggaaattaagctacttgttttgaacattgagcactataatgcaccttcaatcccaaataagcaaaaatgtactttgtgtcagtttcattctttcaatattacttacaatggtaattttgattcaactatttttgtcagcgatcgaaaagctcttggaaggatgtgagagtaaatatgctactggagatgatgtccaattggtttgcttgtctacccaaccttttaataatacacattgttttgctttgatcaatgacttagaaatggtctccagagttgcatcatcatatcaatcatccgtggtttttttctccaaattacattccaacaaaatttctcatttagtttagtcttttgacatccaactttgagaaagtgtcatcttacttgaattttgatatgaattaatgtgctgcaaaacaatttggcatcatttgtgtttcctttggcaagtgatctgaactagtccgatgtttccatattttgtgctcatggacagggagatgtgtttcttgaaccacagatacatgctggcataaatcgcttccaaatcgatatggtacctaactttcacatgctattccatgtaaaacaaaatggatagtgtggatcacggccacccaacttattcataaactagcttcaataagttcttgctttcttgcagtcgaagtacccaatcttggagaggctccatgatgcatacatgcaaaatccagcattcgaatctgcgcttcccaaaaatcagccagacgcaccttcatcataagcatcaagattgtctgaataatttgcatgtccttttgtaataatttggatagggagacaccgcttcctccatcctgcagtactctgagttataatctagcttacccttctgtcatggctcaagagtaattaattgacactttccctaatgatgcccatactttgtatgaagaccgaatgcttctcattctaaatattatggaaagtacggtgattttacatgagactatatatcatgggctacacaacacaaaaacaaaatggaatcatttttcaaaattaattttgagaaagcttatggtaagattaattgggattttttacaactaacattaagactaagggagtttgatcctgttgggccaagcggcggaggagtgacccaagagccttcgccagggaaggcgaaggtcccacatccttcttcattgaaaggagcttaatgcctgcatcctgtgcagagacgtttctattcgttggtaagggtgagggctgacaactgcgaggcgaaccactaagaccttcggcataaatggcggaggctccaaaagatagaggcctcatcggtggagatggagcgcctcaaagggtaaaccggtttgagctgatcgcaagtctgttgtttccttttcttgtcatctagcaggtggtggaggcatgacctcctatgttggagtccggaggctgctgtgcacggagatgctggcgaggagatggtcaggggg

SEQ ID NO: 4860 - DNA, 3758 bp, Sorghum bicolor
tggactttacggaagagaaggatggagtccaagttaccctaaattaggatgtttttttaatctaagttttgtaatagtcttattcgaagggattgagagatgcaataagacagcactggaagttgccatgtgaaagccagtatatggggttgccgtcgaaaggactactgcatgtattaagtagcctgaatgttgatcagaaagtgcaactccttctcttattatggcgtacgtggttcgttcgcaatcaaatagtgcataatgaagggcaactgacgattgagggctctgtggcttttttgtggaagttttggatagagctctgtactctagctcatgagacagacctctcccccataaatggaaagtaggtggtgcgagactcgttggtctgcagacaggcacgatcggctcagaaagccaaagtactattggaagccaccggctgagggttatttaaaaattaatgtggatggtgcttttgatgctatttcaggacgtgcaggcattggagttgtcatccgcaactcgaccggtggagtggggctttctgcctggaaagcaatcctccatgcgagggatgcagaggaggtcgaagcaatggcgtgtagagaaggattacagttggggtcagcatggtgcagaaggaaggtcatccttgaatcagattgttcaagtgtggccaagctcctctaacaaccgttttaccagaggtccagtctgcatcccattattagggaggcgaaggaagctggaagggagttccctgagctagctgtgaaatatacgagaagagagcagaatagtgtggcccatgagcttgcgcaacttgcgaagcgaactctcaataccgagttgtggcatggtcgcttccctatgtgtctcgagcggttaattgctcaggaatgtaatgactttactgagtaatgaagagagctctcttttcctcgcaaaaaaatagttttatttgactaggacttgtgtttagaccttgggtataaataacacacctcgactattgtaatgggcatcaatcaatcaatcacaaagcagttcaattgtggccaccccttagaggtgggagtaaggaagatcttggcgcgttcttcaataagcaggactgcacttcttcaattgaagtgggagtaacgttacgactttgtatcattatttgtaaagcttcatcatttgacatcttgcacattttaatataagttagttaatgattttccataaaaaaagttagttaatgatttttatcttagcaaggttgtatctcttcgacctcctcattgctagattaatattgatcttgttaagtttagttttgaactgaggtcatcacggacgattttactcgctgtgtgctgatagtagtaaataaaggtagacaatattaattgctagtcgccggaggtgagcggcgctccgctaggatgatgaaaagtcaaggctgaaattacgttgactgatttattgtgaaagaaaaacactgctgactaatagaaaattatatataagtcaggctttagagtactagtagatataagtctcgtagattatatataaaataaaacccgatattaacacgtatccaatttcttaattaggagtgtcacactcacggtcatagtagatataagtcttgtagattatatataaaatactcgatattttaacacgtatccaatttcttaggagtgtcacactcacactgtcacacttcactttcccaaagtcgagcaccatctgtcgtgcacgtctgctcaattgactggcattagtagtacttttatttctatatacacacaggcgatctagcaaacacatatcgtgacattgatgtatttgtctctctgtcctcatcctcgagcacctgtggccttaggctagattactccgccaccaggcataccgccggcaaagcagagcaccgccggcgccgtgcatcttgtcctcttcacgctttcttccacgggagaagctttgggtgagcagagatgccgccggtgacggtgttcggtacggccaacttcgcgaacgcggcgagggtcatggcgtgcctagagaaggtgggcgtcgagtatgatgtcgtccaggtcgactacatggctaaggagcacaagggcgccgagcacctcgccagaaacgtatgtaaccttgtactggtctcgctcttcactgcgtctgtaattagctatctactgtatatgtttcctcctctcctggcacccctgccaagatttccacaccgtcaatcttttgcttgtagagtcgcagtgtggttcaaactgttttacatggagtacacatgctgatgtttaatttcctttgcagccgttcggccaaatcccggcgtttcaggatggggacatcatgctcttcggtatatatgcatgcttacaatccagttcgattcatcactagctagttattgccacataaacactactccctccaacctaaattataaggcattccaagaattttgaagagacaacacattttaaatttaaccaaatttattatatgataaaataataacatttatgatattaactaagtatcatcaggttcttcattaattatattttcatagtatatctatctaatgtcataaatttttataattctttctataattttagtcatacttaaaatggttagactctttaacattcatggaatgccatataattgagatgtagggagtagcttgctctgttgttttccctcctcacttgtaaacatcatcaccacgcgtgtgcttaattcttcgattaattttcagagtcgcgagctatcgcaaagtacgtgcttcgcaaatactccaagtcagcagatatcgacctgctgcgagaaggcaacccggaggaagctgcgatggtagacatgtggacggaggttgaggcgcacacatattttccagccatggcgcccatcttctacgagtgtgtcgtgtaccctgccatgcatggcaccccgaccaaccagaaggtggtggaggagagcctggagaagctcaggaaggtgctcgacgtctacgaggcgcacctgtcgaggagcaagtatctatatctcgccggtgacttcttcagcttcgccgacctcaaccacttcccgttcacgttccatgtcatgacgacgccgcacgcatcgctcttcgactcgtaccctcatgtgaaggcgtggtgggagagagtaatggcacggccgtcgctaaagaagatctgccccgatatggtgatccgggcctgactgcacgcacgcactagccgaccatgctggatcggcggattattggatgggtgtgtgtatgcgcttatctccttcgtttcctttctgacgaagttttagctcgatggaacgcctgcgtatttgttgatgtatgatcgaagacattctatcttatcttatacaattagtaaatggagactccaaggcaggtttttttttcattattattgttactgactgaatgtttcaactgcgtttattcatgttgatccttgtaatattcgctagattaaaacataataaatcttacgtgctgtttgttacttttcacagtaacgcaaatgtaaatgaatgtagttcaaatttatctcccgccggtaaagaaagtagctttgtttcatatgaaatggttcatatatttgaaccaccctgaaaataattttttagaggtagttttttttactgcaatcacccggtggattttctaatgtaaccacccctagaaatgcatttttgagggg

SEQ ID NO: 4861 - DNA, 7109 bp, Sorghum bicolor
gtcgacaacgggatccaataacccgcctcgtacgtcaccggatcctggagccttcgacacaccaccctcgacgcagaggcaggacggttggggaggagggtgagttctcgcagccctacggtgcgtacgtgtcggcggtttggaactttggttcgatttggtgaacttgtggactactggatgtacatacatgatgttcgtgatatatatatgtgatgttcgtgagatgtatgtgctcgttgtgaactctgtgtgtgtgatggtatatatatatgtctattgtcttgatgcaaataaacaaacaaaaaaaatttaaaatttctctagtctttgccgagggccttgaccatagccctcggcaaagaatttctcagaaaaaatagaaaacaggtctttgccgagggctatggtcaaggccctcggcaaagaattctcagaaaaaatagaaaacaggtctttgccgagggctatggtcaaggccctcggcaaagaattctccagaaaaaataaaaaaagagactttgccgagggcctgcatggtagccctcggcaaagaaattacccaaataaaaatttaaaaattctttgccgagggcctgcatgggaaccctcggcaaagaaattacccaaataaaaatttaaaaaattctttgccgagggcccaacaatgggccctcggcaaagacgccgtccgttgcagcccgtagcctaacggcatctttttttctccgaaggccggtgtcaactctcggcaaaatctttaccgagtgcccgaccaacggccctcggcaaagatccctttgccgacgggaatttttccgagggctctttgccgagggcagccttcggcaaagcctttgccgagggtcttatagcctttgccgaaggccggaggccctcggcaaagatcctctctgcagtagtgcgtggaccccttgtgccaccgggccttcctcgcgtgctacggttccctgccctcgtgctgcttgcagtcaccaccttgtgtgccgcacactaccgcttagcaaagggagcaatgaaggagaaggggagggagagaaggggctaactgcaaatttcatgtcattcagctgatgactccacatgtcatgttgaatctaaggggtatggatctactacaacgaaccacttaaagaaattatggacccgaagtacaatctaacaactaaggtactgtttagatgcagccaaacaggtcaaaacttttggagaaataagcactttttggaagaatagatctaaacagaggcttgtaaaacttgattgtaaagatttggaatttgagaccttgaagccccaaaactgtgtaaacttgcttagggacccgtgtcagtgtcttgcagaccaaaaaatttgggaagcatctaaacatgtaaagtttacacaaccaaaagttttgggatgtaaagatttgtgatctaaacaggccctaaataatataaaggggcatgtacctatagtgaatcacttaggctagtctcaatgcatgttttatgagagtgtcatgcacattaaatagagtgtcaaataagcaaaattgctgacttggcaaagtcattaaatgaaggagtttcatcagatgagagaggagtttcatccctatgaaactcatttagctcggttacctagtttatagtcttggtaactgtgccatgaaattatacattgacactggcctaaaaaatttatagacccaaaaatcaaccttttatggacttattaaacgaaaccccgcttattaatttaataaacctctagtgtatttaactcaaaaaactaactgatccatatgcatgatagcatagatcccacattattgtatttattagttaagcttcccggaagccccattccggtttacaccagtagacatcacacatgcattattcagagctacgtactaaactatttggcaaccctcttacacaccgacttggcatcctcgatcgtctataaatagatgcatcagcctatcttaagggcaactcactactcaagcagctcaaacctttagccactacacagcagctatagcaagaaatggctctacttcttgcttctgccatgaatcacactgcccatccagcaggccttagaagccatcccaataatgagagtttctcacggcaccacctatgttcttcaccacaaaacatcagtaagcgaaggtctaaccttagctttaggccacgagctcaaacgataagcagtgagtctgctggaatccacaggctgagcccctgggaaatccctaggagggactggttccctcctagctttctcttcggtgccgccacttcagcataccaagtactaatttctagcacgaatgtccatctttgtttgttgaaaggaatgtagtgttaactgttacaaatgatataatgaatacctaaaagaaaaaaattatcatttgtgaatgcattttaactgtatatatatttgtttgatatatgcacaaaataatatacatgtcatgtttgtgtagattgaaggtgcttggaatgaagatgggaaggggccaagcacatgggatcacttctgccacaattttccgggtaacatatatatatactggcaatatcttttgtttataaatataagcagttttttatgtagtaacaataagatcgatgtagtagtttcagcgtaactatcataaatatgatatccttctttcctaaattcttccttaattttctttcatgtatatatgaacagaatggatagtggacaggagcaatggggatgttgcagcggattcgtaccatatgtacgctgtaagtaattagatgccattaactagctcctataaagtgaatgtggaggttaaaatgcagtatgtcttatcgctgagacaaatctatccaatgcaaatatgactttgaaaggataaatattttgtattgtgcagttgtttttttgggggaaaaagttaatgtatatgcactccaaagtatataaatatgtgcctattaatataatatacatgttgttatcattatttatatcagtacatttggctggcaggaggatgtcaggttgctgaaggaaatgggcatggacgcctataggttctccatctcttggcccagaatactgccgagtaagtatatacaaaaatatcccaatatgtttttttcagtgaataattaagttagaaacaaagagtaaatatgatgactagaactaaggcgtcatcatcaagctaataatgcatccgatcagcagagttcttggattgttagggtgctaatatccaaatatgttacggctttcagaggggacgctcgctggaggtattaacgagaaaggtgtcgagtactacaacaagttgatcgacttgttgttagagaacggtaaaagaaacaccatttttcgattggcagcttaattaattaaggaagaacgtaatccaaggtgcaaaagttttgacaaaccattctgtatattctttgcaactcgatcaggcatagagccatatataacaattttccactgggacacgcctcaagcgctggtagacgcgtatggcggcttcttagatgagaggattatgtaagtatatatgcagttcaaatgaatgttttaatctttccatatttagtgtactagctgctctcagttcttccacaaacaaaagagtatataccgatcagaagagagggattattctaaagttcaatttgatcaatatttgaagttactataataatatgtttaaaacctatatatgaactttatatgatttaacttcatggttcatatctaagtattagagaagcatcaatgatcaatactaaaattttttcctaccgatcacaaacaatgctctattgttatttcaacaaagtgtcaatcaactcgcataataactatatttattgatgaacatcattccggattgtaatttttcagaaaagattacacagacttcgctaaagtgtgctttgaaaagtttggtaagaaggtgaaaaactggttgacctttaatgagccggagacattctgttctgtttcctatggaactggagtccttgccccggggcggtgctcaccgggagtaagttgtgccgttccaactggaaactcactcagcgagccatacattgttgcccacaaccttctccgagctcatgctgagactgttgatatttacaacaagtatcacaaggtacaaacaaattaaaggctctctctctctctctctcacacacacacacactcttctaaattaataagtaggtagagatacaaatatcaatatatatactccagcattgagtattaacaaatcaattgcagggtgcggacggccgtatagggcttgcgttaaatgtatttggccgtgtgccatacacaaatacgtttcttgatcaacaggcccaagaaaggtccatggacaaatgcctaggatggttcttggagccagtggttcgtggtgactaccccttctccatgagagtgtcagcgagggaccgggtgccctacttcaaagaaaaagagcaagagaagctagttggttcttacgatatgatcgggataaactactacacctcaacgttctccaagcacatcgacctctcaccaaacaactcgccagtgctcaacactgacgacgcctatgccagtcaagaaagtaagaaattatagttaagaccaatatctactgcttcacagttccaataattaaagaaatttgtcgtcctcatactaatcctgcacttctattgttctgttcaaccagccaaagggcctgacgggaatgctattggtcctcctgtacgcacatatcttcctaacatttatattgttttttacaatatttatactgaaggtgataatgtgaaaaattcgtccaaaaatgtaatcacagaatgctcatggttaaacttttatatacgtaaaaaaagggaagttgcaaaagttttgtgttatagctatataaagcggaacaaatctgtagggttttttccttgtaatatgcatattggtaataatttgtcacaatcttgattacttcaatttgcagactggaaatgcgtggatcaatatgtaccctaaaggcctacacgatatccttatgaccatgaagaacaagtatggaaacccaccaatgtacatcactgagaacggtaagtagtaaggtgctatatatacttttgcattttgtttcaatcataggtagtactaaactttagctaactaaccaacaagtatatctttttcattcatctcatggatcttttgtaaataaagggtttttatactttttaatgaagcaaaactctgaaatgatcccaaagggtctttgcaagaatggctctgttttgtttttgaaagatgagcatagctcctatatacacacgtaaggctaacttagacattgctagatgtgggttttaatacacacgcacagacctgaggatagctgcatcactaacacaaaaggctggtccagtggtgtatctagcctaaccgcgaagatccggtaaccaaaaaaacagaaaaaaaaacagagacacagaaagagaaatctgttgcatttgcattaatatatatcagcttaaagtcattaagctacataagctcctgcaaaatgtcaaaaaaatggattaaactacatcaactcctgtggaagataattaaaacatttcgctgactgaggtggacttgggaagatgacccatagaataatgaggcgctggtacggtgaacataatggtgataaatcaatcgttggtgagagatcataccgtcccacgcacttgtcttctcatggagttactaatataatttgatgattttgcagggatgggggacattgacaagggcgatctacccaaaccagttgcgttggaagaccacacaaggctagattacatccagcgccacctctcagttcttaaacaatcaatagagtatgtatatatatatccacctacctacctctagtttacttaagtttaatttattttccacatccctctatatatatatatatatatatatatatatcacacttgacaaatgcatatgcttgcattgcatccgttgttcctactacgtacgtgcagcttgggagcagacgtgcgcggctacttcgcgtggtctctgctggacaacttcgaatggtccagcggctacaccgagcgtttcggcatcgtctacgtcgatcgcgagaatggctgcgagcgcaccatgaagcgatcagccaggtggttgcaggagttcaatggagctgccaagaaggttgaaaataacaagattcttacgccggccggccagcttaactaattaagtagaacacgtactgcttctggctgatgtatggtatggtggcactgtgtcttctgtgcatgcctgtgtggtctgaaacgacatattttactttgcacggctagaggtagtggaggcatattctccagcgccgcagctaataatgcaatgctctgttccagttcagtgttatctttttattatgcaataaaacgaagtgatcgatttgcaatatttgtaatgttgaattattattattattggccatgtggacaatatctgcaatgttgaattatcatattgtgggcgatgtcttatttttgtcaagtgcggggactacgccacaaccatactgccaagtcgtaaccatggaagcgagattgtgcgtttgttttgggatcggacgaagggagtattctctaacttaaccttttgattgacaaagcgttagcaacgtatgcccaaattctatcaactagcttaaggtaatatcaaggtcacacaggcatgcacaagcgaaatcaataaattaaatgcaatgagtaacaaacaagaattagagagggcaaactccactgctacaagaccggctttagtcccgggtgtaacaccctaaaaattctcttctttaaaatagttcaaatttgatttttggaatcaattttgtgagcattaaaatataggaaaataataatttttgggaagttaaaatttaatataaggttagaaacatattttgacgtatacatgcagtagcattttatttttggtgatgtgtgattttgagcaaaagagttttgaattcaaat

SEQ ID NO: 4862 - DNA, 3224 bp, Sorghum bicolor
aatcatcaggttaagcaagccgtaaaaagactgaatctttgttccctgatgaggagcgaacaatgtctgcaaagcttttcttttttatttgctttgagttggaaccaataatggtccattcctcctcttgttctttgcagtaaagggcaaactctcttcgccagttacgacctccttctctctaaagggagaaaaagatggaaaaggatttgcaagcaatgttatatagtatataaatcaagaaaccaacattcttgcaagacaccaaaaatctgaacatccaccccgagaggtgaatgacgttgaaatcattggctacacctcccatgcatggaggcttgaaggatcaagctcacagattcctcattcaggcgaatagaagagcgaccaaaacttgcaacaagatggaagatcgttggagaggacggggctccgggactcaccaagcaaccgaaacgtcgatgaactaacttggcaaattccactcctgtgccgaaggggagatccgggagtccatccatgaagaggaagtcgagatggatcaaaggagatctccatgggtgggagaagggtggcgggggtgattggctggcgacagctaaacggccgccggcgaaggcactctcttttctcacgtttttaagacttagagttgcataaaaagaaccttctttgttttgaaaaactaaaagatcaaaggtcgttgtagtatccctaggatgatcggcacaggtgaaaagcttcggatttcagtgcgcgaacagtactttcagccatgactattcagacaagtgaacatgccctaagattttgatcacgtatgactaaattgcattaactaaagaatattttgttaaactgcatatgtgttattatctaagaaaaagtgtgtgtacacaaaccacaaacggctgtgtgtatatgaaccgccatgggcagaatccaataccacaacgcagcactggggagcaaaattaagaaactcgtatacgtatgttgggacatgaatgaactcaagtcacatctatgtcctgatagcacaaatgtcaagaggaaaaacaatcctgaggcgtggggataccaccggggttaaatatggttaatacacacacagcgttgtcgaaaagcaacagcactttcttgcattcctcactcccaatagtaggagtacattgcatacggtccaccatccgcgttggcgttgcaaatcttgagtagaaggaataatggcacgaaggtagctagcgtcaagatcttgttcatcggtaattaaataggttttaactccaaaatggcctgtccacacctacacacatgcatatatatctaagccctaacagattatgatggatcttttcatagatcagaaaaataaagtagattccggccggctaatgcaaggacctgtcgatgaaggacggactaggaatcgtatcatatcatccactctaccataatccaacgttatggctgtcgtccgatcagaaatcaacggtttgcttgcgatattctcccaagatatatatggcgtgaagtgatcaactacataccacgtatccttaatttcattcatgcatggtcatcaggatcttccagattctcttattgcacttgatgactgaggaatatttacttgaccaaagggcgcaggtagcatatatatactatctttgtattatatattgcactcactgcatgcatgccactatatgtctgtaagcatgcatagaggcatcccattccattctcttgatctccttttctccaagattgttccaccacaattcttttgccagacgccgcctatatataggcaatagtcgcactcccccataccaccccaaactcacaaattaagctaataagctagctagcagcatttcagcttggcaaagctccaagatatatatatatagctagtgtacgcacgtcgtcttaagagtttgtgccatcgatctttcgatcgatataatcagcgctagctagctagctatagcatcatgtcgtcgagggatccgctagtggttggaagcatcgtgggcgacatcgtggactacttctcagcgtcggcgctgctccgagttatgtacggcgggcgcgagatcacctgcgggtcggagctcaggccgtcccaggtcgccggcgagccgacggtgcacatcaccggaggccgccgcgacgggacgccggcgttctacacactgctgatgctggaccctgatgcgcccagcccaagcaacccgaccaaacgggagtatctccattggtacgtaccaataatgcaagctccaacagtacatgcatgcattctactttatttttaattaatttgcagctggtttttcagttcgtgtctcatatctatattacatgcatagattctccgcattattatttcacgcaccctggtgactgatcgatgtgtgtaacaacatgcttatgtgatatatatctaggttggtgactgatataccagaaggagctggtgccaatcatgggaacgaggtggtggcgtacgagagcccccggccatcggcggggatccaccggttcgtgttcatcgtgttccggcaggcgatccggcagtcgatctacgcgccggggtggcgcgccaacttcaacaccagggacttcgccgcctgctacagcctcggaccgcctgtcgccgccacctacttcaactgccagagggagggcggctgcggtggccggaggtacaggtgatggatcaagcgacagcatagaaacaatgcaagacgacggtgacccatcatgcatataacaagctagcgagctagctagctagtacacataccacaacaataatcttcgttgttggttgcttcaacgatatatatatgcaactgatttagaaaatagtcaagggtaatttatgggacacaaacacaatagtgcgtcggacggtcggagtgtataggcttcgatgctcgtccttatatacaaaagtccatcgtctgcaggtcaaattatggactattggtatgtcagtaggttggtgacattgtgcttcattgaaagaagctgctataacatttgcctattaatatttgggccttgttcaatttacgaaatttttttgtttttgctactatagcactttcgtttgtatgtgacaattattatccaattacagagtaactctctcaaaagatttatctcgcaaattatagacaaactgtgtaattagtttttattttcgtctg

SEQ ID NO: 4863 - DNA, 2653 bp, Sorghum bicolor
ccgtgttcttttttttgcagttaaccaaattgggatttgacatgtttcttcatgtgcaactgtgccctactttcctttgatattgataatcatgaagttttattgtccaagaaatggtgtggattgtgtattttgtacataagttcggtctcgtgttcaatgtatggcgaaatttcagtagttaattgcactaaagttataatggtttttgctaaatgtttgtagtcattgattcaatttccaaactttttgcgagtttgtgctgtcaatcaatctctgaacaacatctatgtgaactgcatttgttcgaattctttggatggagtattcagctattcttactgagtattggactgaattgttcaggcacaggctgagtagatgaaagcctaggcaaagaaagagctggcgaagaaggttgtcggccctaaacagactggtgccatttttttttgaaacaacaactatcaatatagaatggacagttactaaaagattttcaacatgtatattgaatggatctgagttgctgtacagtatagatagattcagctaatagagttggaaatttaaacattcataatctatcttgataatggtagcttccttcaaaatctcctatcaagtcgagccttctgtccatcccgttgaaatgcaccaacatttgataacatacttaggctatgtttgattttttttaagtgaattaaactgctgtcctgcacatggacaacatgctgctagccatgagttccatcctttcgtacaaattgggcagctgctgaaatttgttgagtttgataagattaaggttgtagaaatttattcaactttcaatcaaattatgctgcacctggatgagaattatcatgtgacatactggaatggtttgctttatcaaattgagtgtttcttattcttgcaacccacggaaaggtctaatacagtagagatggtaagtcagcagcatcacgttctccgtgactatattaatttcacatactttggtttttgaattaagtgtcactttaatatcgatacttatttttacagtattgttattttatcgtgtgatccgtgtatttttaatataaaaatttagctgtcccgtagtaacgcacggacatgctacctagtaataaataaatcataacaagatcccaaaccaccccggaccgacggaaattccagtcttaaccgacagcccacaggctaacaacccgtcggttcagcgatagcgacacagcatgatccttaagttgctgctccgtgccgtggctccctctgtaccaatggtcatctcaaacgactcgaacgtgatatgaatacttttctccgattgtaactcagatagcgaatacaaatagtacaaagtaactgatatccagtggatatcgggatatccaacatttcccatcgtcgaggtgagactaaaaccaatcaggttagttctttgtcatcctttcttaacagaacattctctccttaatagcttctcagatggaatgccttgtgacctgactattcattctccaacattttcaggcctaacgattcgattagcatctcagatggaatgccttgtgacctgactattcgattctccaacattttcaggcctaacgattcgatttctcccacttttctgagctggagttctaatcccttatttttctcatcataatgcatcgcatgtagttggagcaacatgctatcctcacaaaattcgtagtcaaggtccagggtcttgagaacgtcaagcacctttcataatccagctaagatagtgccacaaaaaaggtttagccatgcttaggtagtccacataactcactgaaatttattgcaagtgcgagtacaccttgccacaagttcaaaatcatacatcagtcagttcaaaaaaaaaaaaacgtacaacatgaaatgtttatttgacctcacagcacaacaatgtctcaactctcaactcaacagagcaaggtgctgagtgaacagaatatcaggaaaattttccaaagatgaattgttgtaatcatatcagtattgttactgaaaaacacttccctcatttgaaacagagattatccagacagttcccgagcttgtcaaagcttgtgataaaatggtgcatatttgcacaaaaaggatgctgaaaataaaaaccccatgatgttggcctaagtataaattttgaagaaacccagacaaagggattttggtagatgtcatgtcatgcttaacctgaagaatggacacttctcatcacgagagggctttctgaacctcaacagtcacttcctttggtggtttctctgcgggcaggttcaccactaagcccttcttggagtaatagtcaatcacctggacgagccgattgttttcaaattaggaatactattgattaaaaaagttacatcactaagtacagagaatacacacattgtcatgacaagtcggaactatgaatagaaagcagacagcccagaagacttatgcaatcacaaaaaaacatataggagtggagcatcggaactatgaaggacattaaaaaatgcacgtcccaaatggcccaacaaaccattgaactttatgcagcactatgacataattgatgatataaataattaaatggatggtggaaatcatcaatgaa

SEQ ID NO: 4864 - DNA, 3768 bp, Sorghum bicolor
agagtagcaagagcctagagaggattgagatttaagagatttcttgtgagaatccttctctagttgaattccaagagtcaagtgtgcatcctccactctctagtgccttgtttgggtcaagtgagagttctttgcttgttactcttggtgatcgccatcacctagacggttcggtggtgattggaggcacgaagaccgcccggagttcttgtgggtggctcatgtcaagcttgtgagcggttttgggcgattcaccgcgatggagtgtcgaagaatcagcccgtagagagcacttggtccttgcgcggaccaagggggagcaaaacccttgcgcgggtggtccaacgaggactagtggagagtggcgactctccgatacctcggcaaaacatcgccgagcattttcttccactacgcctttattttctagcatttactttgtgtttttacattcctagaattgccatgctagaataggattggaactaggttgcaaaacttttatccggtagctctctagtcacactaggcacaaagggttgaattggagcttataggttgcttaaatttttagagaatccaaattcacccccctcttgggcatcttgatcctttcactatccatgccctgggaaggaccctttgtggttgtggaagtcacgcgtcccacttcctatagactggcttatctggagggaacaagtctgcctaactcttggcacatagacaaactacgacgtttttacccttagaccagtacccctcgtatgtatcttttttcttatgattaatgacaagtgttggttttttgttccatactttttatactcagaacattcgacaagtacgatctttttttgttctcgtcgcacaagcttaagtaaggaaatcaagtagggtactcggcaaccctcacttagtgatacatcactcttagaagttattcacagcgcttaaccatggtttacaaatttccgctttattacaaactttcccagcaaagtttacaataaaagcctctctgggcggtcctaggctaaacgtacaaactaaactggtgcttggtgctcgggctgctcgccgacacgcgtctctggtgccgtctcctgtacaaactaaactgcaggtgctgatcgtccatctgccgcagcggatgacttcgaccactccatggtcgacctatctgaacctagccggctgggcagagtagacatcccatagagattaatgttgccgatcacagtcgacgataggtccaggagactaacttgaaggtcatctgcttcctttggactgacctccttggggtaccctccctccaagcgggactggtcgatcaggggttagtgggcacgtaccatgcttacactacaccacaacacttttatagcgtcagacatctgacgcaaaatcttttttttgcagttagataatctgacgctaaatattgcccagagaccatctgacgctaaatctgaatttagcgtgctattgtctgacgctataggtatttatattcagagtctaactatctgacgctaaaacaagatacactgtccacctctctgacgcgaaaaataatgagccccaccctcactcgcctggccatgtatgcatctaaaccctaaatttttttctctccaattccaaaacccagcctccacatcgtcctctctctccgctcgagcgagtgccccgccgccagcgccgcccgcccactcgcccgcgccccaaatcccaccagcgccgccacgccagtgatgcctctcaccgcagcggcttgacggggcgtgccccatcccaaacctacctctcggcggagagcgcggcgtagctgcagtggaaggcacggcctgggaatccaacggcggtggagggggagatggtggtgaacagccggccgctgaagagggcgagggcgcgggtcgaggccacggactttgctaggttcccggcggccggagactgcggggcggccgggacgttcagggaggcggtgaggggttcctcgcaaagcatccgaggctgctcccgttgccgtccatcttctccctggcggcggccgcggccaccccgccgcacctgctgatctggagggtgtccctaagggtcggggaggcgggggaggaagagagcggcggcagggtggagctctcgttgaggaggatgtgctccgatcccgatccgtgtattgcgaccagtgcagagtcgtgggtgaggctttcctctctttttcctccttttttttctctgattttttcctctgaattcaatggagcaagccattcgttttttatttgtccatctgctctgttttttcttgtcggtcgatctaattagcgctagattttgaaatctaacgactctctgttttctttgaaattttattgattttttgcggaggggataacaccacattctttcagttttttttttcattcaaaatttctaatttctgctagctttcagtgcgcaacacccattagaatgattgattgaattgtcacatactcgcatactgttacatacagcaacacggcatctgcaatgtaatctagcgtctgatttgttgatttgtttgtttggttgcaggttggagtgggcacccggtctgcgtgaagctgtaccatttcatcatggatagcctttctgatccccggcgcacctgctgcctctgctgcgaaacacccatggcagctggagaatcaaggtgggaggcaaatttttgaaaaatatatacatacttgcataacagcgaaggaaatggatcatgcatgtgcgtgcgttcgatgcctataatgcccaatgttaatacatgaccagctttgtgccaacgtgccgtgcgattgatgtctacatgcatccaatctgaatgtagggaacttcatataggtttgtgttcggtggggtgggctcgtttgcatttggaatgtaagatgagagtgcagaattgtttctattacttttcataggcagcatagaaaattcctcagaatgaaggattcaccaagtaaccttgtgattgtgatgctccaaatatgcaacatactcttactctgactgcactgtcttctccaggtgtgctctgtgcaatttctatatggatggtgaggaggtcgaagagtgtgcatatctgcatctggatgactcatctgacttgctgcacgctgtagtgcatgcaaatggttatgggcaccttctcagggtaaatgggcgtgaaggtggctcaagattcctcactggccgtgagaggttttccttcatatagtagagattttattttagataacccccatttcagagcatctgcttccagcagagcaagtggtcaagcttctcttggttgctaatgataacctattctcttagataacctatattatcttctgttggttcatctactggttgctagtttatttcatctcttggttgttcaaacgacaacttatgttatcatctcaatggtcaaaatatagccctttaattcaaaatttgtgagttgctggtttggggcatggtaacattcgttaccaagctcaggttgttgttttctgttgtaacaaacctctatcttcttaatgcaatgcatacataaggcatgttctacaaaaaaagaccacttgtacaaactgttctttgattttggaacctgaactattctgaagtggctggaagtccatgactctatacttttctctatagtgcttgcccatcttttgctttgaatttgcccagtgatggtagtagctgaatattgctagcaatttc

SEQ ID NO: 4865 - DNA, 7184 bp, Sorghum bicolor
gtactacaattggtggtctttcactaaacatgggtatgcattttaatacgtgtatctggattttgattcaaattgccaatattgatataattgtttttcggttatacagatgtttcaaccactatggttgtaactcctggaccagttattgattttctcctcacaaatcaaaatgtcagagacatcagagatattgactggcccagggtccgtggaataaaataactctccctaaaatcctatgttattcgttttcttcattttctggagagcagagcttcaaatattttattaacttctacctttaaatgatgcaggccaagaaaatgcttaaaaagctcagagttaaagctaagcacaacaacatggagttcaagattattggccttagtgatcaaccatgctctagacaaatgtatagatctgttcttgcgatgtgctttatgcgctgttccattcctttgctgattctgtaatatgcacaggtttccaatgaaagttcgaaatggaagcattgaaattcaaactgtggatatcactgttcacgattattttaagtccaagcaagttgaactaacgatgccttatctgccatgtcttgatgtgggaaaaccaaaacgccctaattatctcccaattgaggttgcaaccctgcttttgtttcagtctacattctacaatgtagtctggttatcataggtcccttttttagataaaggggttgtcatagtttctgactgcacttgatgtttgagttggtgccattaaaatttctattttgcagttatgccacatgttatcacttcaacgttatacaaaggcactgtcttctcaacaaagggcaacgttggttgaaaagtcgcgacagaaacctcaagaaagaatgcgagttgttacagatgtgggtaaattctgtcaatgttattactcctccctgctttctccccttaacttggtacttacagctaaaatgtgcaggctgtaaaaagtaatatgtatgatgatgatccaatcttatcttcctgtggtattgaaattgacaaacaacttactcgtgttgacgctcgtgttctctctgcaccaacggttagcctattttgccttttcttttcattatcacactttcgtatatgagtcatgttttttaattgtttggattgatatgctattcagctagttgtggggaacagtgaagactgcatcccgaacaggggcaggtggaactacaataataaggttgttactacactacttgtgagagaacacatttatctcagaacattgtgctgaacttcaccttttttttcattattgcagaggctattggatcccgtcaagattgagcgctgggctattgttaatttctctgctcgttgtgacatgagccgaatctcaagagagttgataaactgtggacgcagcaaaggcattgtaagtattttgtggtattttgttttcttgcatggtttgagggatgggatggcgatggatcatctcaagttctcaacctaacaaacttcgtttgaggaaccaccacaaacaaaagattagtataacatgaggaatggtgtgatccaaataaaatttgggattaccccatgatgggccacactatccttgttggggttgatcctgatccttaaaaccaaataccccacgaaagcttgaacatatttagcattcttattatgctgtgctttgaccgtacaagttatcccttgttttgtgcagctcattgaacgacctcacaccttggtggatgaggacagccagtctaggagatgttcacctgtggaaagggttgaaaagatgtttgaaaaagtcaaaacaagccttcccggtcctccagagtttctcctttgtgttttaccagagaggaagaattgtgatatttacggtaatacaatatacagttactgtttctatgctaccatgtatcctttatgcaactaaacttaaaatgccttgaagggccatggaagaagaaaaatcttcatgaaatgggtattgtcactcaatgcattgctcccagtaataagatgaatgatcaatatttcaccaatgttcttctgaaaattaatgctaaggtatacatttatcagcatctgatttgtgacccatatgatttgaacatagatcctgttattagttttctttcttgactaatatgatttttcctgtcgactagcttggtggaatgaactctaaactggcattggaacatcgtcaaatgataccagttgtgactcaaataccaacattaattcttggcatggatgtttcgcatggttctccaggtcgagcagatataccatcaattgctgcggtgtgtcttgttctctcttgtgttacttgcatcatgcgaagattggttttcacattacttttcatatacctatgtgcagtctagtttaattgaacagaaagcccaataatttgcaccatgtttagggaacaccaatatgaatgttatggcgaatgggctgaagtgttatggcgagtgtgttggttcttgccctggacttgctgcatcactgtctacgatagttcacggtttgttagtttgttcagatctgttagcagatagaattgatttgttacttggataagatttgttaggagttctgttaggtgtctagtttataaaggcagctgtgaggcatatgttaggcaaacgttctccctaatgctgatgtctccaggggctcccaggctcccctgtggttgcagccatctcagcctacaacccacatgcatgccatctctactgagcaccccacctgggacaaggctctggcgatttccactatggttgttcagcaagcagccttgttcttatccaacggatatatatctggttcatctaggggagtcaaagccaaccggcgctgtgggcttctttccatgggaacatgttttgctgggttgcttatcatttcagcctccagagaaggcctgaccttggcctgtggcaacacacatgccatgtttcatctgacccctgttatagtgcatccattgttacttgtgatcctttgtggcctgacgtgctgtatcagaagctgttttggtattagtttgttagcaggtaggtttaattagtgcaacatcctaccgcactggagacattccattcgtcaccttcggagctgcaagcacctacttcagcctatcacagcttaaggacgagctgtcttcgaagggtgctgaagtgttatggcacgtgggccggttctggccctggacatgttgtgtcacaacctaggattaggtcacggttagtttgttcagatttgttagcagatagaattgatttcttacttggataagatttgttaggtgcctagtctataaaggcagccgtgggcaggcagaaatagatctaagaagcagctcagagcctccagagggagggtgatttagtcgatctatctgctattcttgtatcccgttccccaatcaatctactacaacaatgagtttatgacactattctgaaaatttagagcactgttacagcttgctttcctagtttatgattgctggtttcaggtctctttttattgcctccccccatgtcaatttaggtaggggaagactgaaattgacatggggggaggcaataaaaagagatttgaaagttttggatatacctaaagacgtgttttcataggagtgcttggaaagcagctattgacgtccctgaactgtgattaggggctcttgttgggtttcaactctagcctaccccaacttgcttgggactgaaaggctttgttgttgttgttgtaataatactatgctaaagttttcctctgtaggttgtgggatctagatgctggccattgatatcacggtatagagcatcagtgcgtacccagtctccaaaggtagagatgattgattctctatttaaaccactggatgatgggaaggatgatggcataatgaggtgatttaaattaacatcttgtcagttttctgtgttatgttcttctagttgacctcacggtatcttcatgttgtatgaagtaatttttctcaggaagtggggccttagtctgttatctaaaagagaacaggaatggcctagtacccttttcactttttcattgcattgcagggaacttctactagacttctaccaaaccagccagcaaagaaagcctaagcagataatcatcttcaggtgtgtactgagttaatttttattttcagttatatatgcctatgattgtgtcatacaatgatataaaaggcgcatttgtttgcagtacgagtttgtaagagtgtgttggtgtgagcatggtgggtgtgctgtaatttatttgttatctccttaatgcaatgatatgcaactctcctgcatattctacaaaaaaaaagtgtcatacattgttaagctgtgctgaatgtgtacgtcaccattttttttctccaactcaaaggatcattattttagtgcaaactggaatgatttgttttcttgaatgatcatattttggtgattcaaaggaacatttggtctttccatgttaatttggttgtgttaatttagcataacatctagtaagatgtgtttgactccacagaattttaccaatcttaagccaggacaagtcaaatatctgtagctgatttagtatctctctagttattatcggtttcttttgtaataaaaagctatcatttcgtaccagcttttcttaaaattgtctctgcagttcttattgaagtgtgagctcttttgtgttaaaggatgaaaatcagtttatagttcagagttggctttactttgtgtgaattgaagttgatacacttcaataagaagttgatactcagagttgaaaattaaatgactcagagttgaaaattcagttggtgtcctttgattaaattactcaaattactcagagttactcaaattactcagagttgaaaattcagttggtgtcctttgattttccttttgagaattgaagttgatacacttcattaaatgaatgttatatttgagtaattttgtacagtatggttaattatatcatgtatgttcctttctatttattttgtggatgtgagggtgtctttgtggtttcttctttctgtattgatttgctttttttgttcctgcacgatgatctgggcattcactggtgctgtgacttttctagtgtttctgttcttggtattcagtgttgatgaattcttatccttatggtctacttatgcagggatggtgttagcgagtctcagtttagccaagtactgaacgttgagcttaatcaaatcataaaggttctgctatgcactgttttgcttgagaattccttggttttctggcatttcctaacaagagttagacaatacaggcatatcagagtatgggacagggggaccttccaaagttcacagtgatcattgctcaaaagaatcaccacacaaaactcttccaagctgattcaccagagaacgttccacctggtaagcacccttgtccggttgtcctgcttaatactgctaaagattcttcccctttaaacagcttgagcaacttgcactttgtctttgcatcagggactgttgtagactccggcattgttcatccaagacagtatgatttctacatgtgcgctcatgctggaccaattgtaagttctctagagtagttttggattttgcttgaccatgcttgttagtaattgcttaactggggatgtgtcagacatgtttcatattgagcactaccatgttctcttacatagggtacttcaaggccaacccattaccatgtgttgcttgatgagatcggcttctccgcagataatctccagaagctagttctttcactttcatatgtgtaagcacatatgttcatgtctatttccttatttcgtactcttatgtgaggataacatgtttgtgcttgtataggtaccagaggagcaccactgctatttctgtgggtacgttgatgttttcttttgtactaaaaaaacgtcacgcactgtttgatggttcttcctattttaggagacaatagatgctctctctctcctttttttctgaatgcagtttttgctttttcagtggcacctatctgttatgcccacctcgcagcagctcagatgggccagttcatgaaattcgaagagtttgcagatacatcgtcagggagtgtcaattcatcatcgtcagcatcaataccagaactgccacggctgcatgctgatgtctgcagttccatgttcttctgttgaggtgattttagtttgaccgttgtggggtagggctacttctttctgaaggagaaccttatatgttggtacacagcaggttaactgttttgtgaagaaaccaagtaggttgttagttgtcgcaaatcatgtacgccagcatattttggagcagttttgggctcccccccaccccaccccaaaatgtaggtacagcttccagattttaggtagcctggacgtttgcatctgcaggtttttcgattggaatctagaagattttagggatattgagagagtagagccagacctttgaggtgaaggatacttggttaaatgatctttctgttaatccccaaaatgcgtgtgcattgggggggtataaaaatgagttaaaatttctgtatctcgcatggcatccaattgtactcgagtgtttgtgctgtactcacttgctgcgtctgaaatgcgaaaatgaccacagccgctcgcgactcgcgagagaccacaggaaaattcttgggcgttttgtattcttgtcatcttgtgagacttgtggctgaatcacttttaggaaatggaaagcttcaggcatcaggaaagctctgagcgaacagatagggaattgagaaatacaagcatcaggaaaaaatggtcaaaagtttttaggaacttgatgtttctgtccgctgtagagtgtaattatgatttttatctttatttttttaactttgtaattttgcctttactattttgaattgaaacgtctgtctgcccatatttctaacatcgttatgtctatagatggattaatttaatgagaaaaaataggaaaaagaatgttcatgcgaaaggtcaagaatacactcaatttaacttttctccctggctggcctcctcggtcctcgcttgttcgtcttcaatgtatctgactagagcaaccccaag

SEQ ID NO: 4866 - DNA, 5633 bp, Sorghum bicolor
gctctaactaccttgtattcaaaagattttcatttgaggtcatttagtgtcttgtttgaccaggtttgaccaagtcacgccttgggtttttgaaaaatatgactagagttttctagaacttttctaaatgcaaaattgtactatgtatcaaaggtagaccttggtgaggtctaactcctttgtattcagaagttttttaggtcttttattggctagtttgacctagtttgactaagtcaaacattggatttttcagaaaaaatactttgaccggaccctagatggccccagctacaaaagtcatgaataaacaaaaaatacatattgaaaaacctattaaatgaataaacaaaacaaaagccaaaactaaaaagaaaattgggggtatggatctccagccggtggcgtctatcgtggagaaagggatacgattttggccggcgcagagtcccgcagaagggcgtggactgtagccagcagctgacctgcagcctgatgcgtgcgaatgtggtcagcacactgagatgccaagtttcggatctctttttgccagcatccaagctccagaatacaaaaactgtcgaacactcccctcttatagaaaaagggattggtcttcagtggctatcgcagttggcttaggatgaaaacgtcgcaggtcccaggttcaaaccctgtggctgccgacattttgttgttttttttttatttttttatccaatcatatatggggctataactatggtgtttttttttgaatttttttcatccaatcctacatggggctctaactagggcatacggtagtgtgcaccaatgactaaataggataacgtaatattttaaaaataattataatagatttatatttataatgatcaattattgttacaatctatcatcacaaataccaatattttggtgctttcttttaaaattttcttcctccaatcctacgtgggactaggagttaactaggacggaaataattcacctaggacatatgatagtgtgcaccaatggccatgtgggataacaagatattttaaaaataattataatagatttatattttatgacaactaactattgtcacaatctatcgtcataaatcccatgcagctagatgctatgacgttgtttatgacgaagacacagtttggtcataaacttttgtcatccactaaacagtcgtcataaacagcctgtgtttatgacagataggtgttctgtcatctggtaatcgtcatagaagcccagatttcttgtagtgtattgccaagtataattgcactaactatggtatgctagactttatagttaagaataacttaggaaatattcttgtagttcgtcctaattccatgctaatgacttgctagaatatctattaggtgcttatcattattatatgtggctaagttatgctgatcagattaattatctttgtcaccattcatactttatctatcttttatgtaacatttattcctgtatgaaagagatagataaatgctctcaattatacatgcaatgatagatactcaatctatattccattccataatcaacattgatgtttagcaatcccttcccaatggtaaaaatataaataatgatacctagaatacttcccggttaaaatgctacatcggtattaatctgtgcgcttgcagatctcatttattatttattcagaagagcaattgcatatttcaataccgcgtctctcatgtcatgctggagatgacaacttggcttaagtggcacgagggataggtttggcatttttggcgccgttatcagaattagaaaactaagtctatttttggtagtgacgttaagaatgcccaacacttaacactacagatgtgaagtggaccttcacgctacaaaggagacagtttccggtatgaatatgctatgctatgacaataaataagagccaggggcagaccctttcaagggttggcctttacctaaaaaacctgtgtttacacatggccaactctatgtggctgtttcacggtcgacttctagaggtggcctgagaattttgattgaaaatactaatggttcatgtggctcagagactcgaaatgttgtgtatcgagaggtccttgatgccgcttatgcggcgtcagcctaaaacttttgggatgtgttagattttgggccttgttgtatatacgtgcttttgaaaatgttggcttgccacctacatctcttattttgtgttggttgtattggttcacatgatgtgtatgatgccttttagaccaaggttcccctcttttgatctaatcttaatctcgcgtatgaaacttattgtgacgtgactgttgtactaattctacatctcattctgtgcttgtagatgggagataggctgattcctggccttatgcctggaaactgcagtgagactatatgtgtgcgtgcctctaggttccggaacttctatgatccacatgatgaatcaaagttgctgcacaatgacctggttttgattgatgaggaggtatgttttgtcacttgtcttcctgtgctcacaacatgtatgctgattataagattatgtatattgatgataagttgtaagatccttagtttttaccatagctgcatagttttttttttactatggaacgtagctgtaaaatataaagttacatgacatgctgatctccacttattttatgcagggaaactgcatgcatgcacagatttacccaccagaccatgagcaattcaagcctttgataaaggaaggctgtgtgtacaacctgtcatactttcgggtcaggaaatctggatagtacaagccagttgataatgatcacatgatcaattttacaaggtggacttctatggaggaggtcattgacatcccaccagcttttcctatgtatacctattcccttactccaatgtatcagctaccacagcgtgttgaggtcaacaaattcttcacaggtatacctctatatgcatagagattgtggtcttagcaaacctacacaaaaagcttatgtgtggttattcacctatgcagatgtcattggtgtagtcactacgctctcgaatgtttcatcgatgcggagcagaacacgccaaaatgaagtgctaaagaggacggtcactatttgtgatgcaaggtcggtcgcccaaaaatattactcattaactctttaatggatccttgtatattatgatcgtatacactatactatgtatggcttcttaattcatgaaccatggatgacaatggtgcttcactggatattatcctttggggtgagtgagcaactgtgttcccagctgaacaggtccatagagatggagaggccaccccacagaccgtgatatttgttgggactcttgtgaagtgctttgcaggtatgtctattgtgttactatgtgattgttgctatgaatctacacctaaatccaccacttgtttcagatgtagtgtcattgtctgggggatcgtcatgcaagtggtacataaatcttgaagtgcctgaggcaaaggcccttgcagcaaggtgacatgctcatctagatatttatcaattacatctgccatcgccctctaaacctgatctaaataagaacaatgtctctagccccactctaaactatcataatcttgatgaacagtgtggcagacatctatcaaccagtcaaatgggatcagcatatggcttccagtgagcctgtggcttttgctgctgctgaacataaaaaggtccccgacatcaagatgctccatccattcaagtacaaggtcatatatttattctttcgtctcatttgtctatgctaattcatagcctaattaacataaatttcaaaatacgtctctacagaagacaaagtggctggttacagtgacagtactgaagattgataaatcatggtggtataatgcatgcaagaagtctctcaagacagcaaaaccttttcgtgactctttcaaatgcactgagcctaggtgcggaactgttggtgtgcctatcccaaagtcaggcaaatgcttctacctttgtctacgacttgttaatggatggcttgtaccataggtagaaaagtttttgctaattgatcctgcctttgctcataggtacaagttgtgcatagttgctggagatgagacaggtgaaactgagtttgtcattttcggacggattgcacagcgtctcaccagaaaaccagttgatactctgatcgcagataatccaactggtttcattccagatgaggtcacaaagctactggaaaaggtgtttgtgtggaatgtcaccttcatagaaaacacaattactactgcgattgtctcttttcaagtcaatactatcgtggctcaactagatggtgacaatgctctttcagtgacgccaacagggtcacagtcatcatctctcatgctctctaaggatgctagcagtagcatgcagaaaactcctcagaaaagtttcaccagtgttctacctttgccaccagctacctcagaagctagccatgcatccagtgacacaccaatcaaaatgcctttgttgatccctggagcaccagctacaccggacagttgcaaggccactgctgaggatgaggtaggttgtgcatgttcatttcaatacatgttttcttgtgtatctatccaaagttggcttgttacacaactctaccatatgtgtagaatgctatacatgatggcaacatacttgctttaacttcagggatggctactccaaatcctactgatgctccaacaactcgtcttgtttcacctatgcctaaggtagaaaccgcacccgttcatccatgcctttcaagcctacctgtttactaggttataacatctgtggattcttggattgtgcaggctgttgatggttctagcattaacaaagatagtcttgacaattctgaaatcaagacacagaaaagtgtgaataagaaaaggttagcactactgaaaactaatattttatatatttgcatgcctatcgcatggtgtccttacacttatgcatgtggttgtttacttctaggacccgcccatcacccaaaaggactgcaaagaaacttttctcggatcaagataccatggatgactatagagcctaggtacatccttcctttttctatatggttttgtgattacattttctttctaggctttgttttcaactgttgctactccttccatgtgtatatgattttcttggtcaatgaaaataaataatcagagtatctatgggaaagattgttaatacatagtgttcctttcatgctggtattttcatatttacatggcgtgtgccacttgtgataggaagattttcttacttctctttatggctttacacatcatgcctcacggtctctcctgtttttacagtgcagcgactgaggataactaatcagcaaaggaaggtcaaggtgcttttgcacctaccagtagcagcgaagtgctcattagcgtgtatttgaaacctcgcttgcaactgatgttcactgctcttttagtttctctatagctttatatatctgctctaacgatcacccatgtatttggatcagcattctaaggtaccggactatagtgttcggtagccgtgaattcc

SEQ ID NO: 4867 - DNA, 18811 bp, Sorghum bicolor
ttactgcacctttgctgagacattgtcaggatggatattaagtttgactgttttacctaagcttaaagacagaatctaaggaggtcttctacatgaaagttgtagggaatttcataagttttctaacggtataagctacaactctattagattcacagaacaagagttatgtctattttactatgttggtgtattacatatcgcgaggaaatttcaggatattgtttcttcccttgcacataagttctctagaatgtcagaagctctcaatgttagttcacttgtctggaaaacatgcaagctacatttcttgtgccccatagttcacctcgtcttaagagggtagcctaattaaaaaagttacaagagaagaagtggttaatgactggaacatctacaaggacatcaagtgcttggtatgttggtttgtttcaagatatcattctatttggagtgtgctaataccaatggaggtttatgtcactactgatactcatggattaagagttgtgtatgagggtcagatgacaccaaagtctacagagttgtatgtacagtgtgagagtgaagcaacttaactgtgataaaggtaccgataattggaacttagtgatgaaactaaccttggatcaagagacttggtacaaggaatttaaaagactatgatgtgtagcgtctaaaaaggataggagaactagtccctagtgtcccccaatcaacctcgtcttaagggggtagtaccttgatatcacgggatgatgtttttaaaactatcatgtatcttatggtcatgtgcacacaaaggagtgatctatgatatccagtgaaaaattttcttaaccgcaccatcagggaaaagaatcgagtatcaaggtggtccactcctacctgaggaggcatatccatgctaagttaccatgtcttcgagttgtataagtcaaaagttggtagtcaagatggaccttgatcaattacgaataatggacgttttatggaaattttgtttacaagttgtgatcctgagacataagtgtttgcatttggaatgccagttgtgaagttgaaatagttatcaatatctttttctgtttctctgttggaatccatgcctctttcgaatctcgaggacgagatttattttaagggggtagatttgctatgcatcacaccctagcagggcaccctcggctaggagaagccatcgtgtgtgtgcccaaaatgacctgtggtgtgacggaggagcaagaactaggagggacgagggagacgatcacgacagagacagtggcgcatgagagaagtagcgctatgggatcgcgtcaatcacactctttttggaaagagatgccattgatttttgtttgcttttttagcttggatgcgactgatttttttccccttctttcgttagtattattacgcgcgtgatttctgcgtatggcaaacgaagtgaaggcgcaaggtggaagcggggttgggaggcggaggagtgacaccaataaatcgtggtaccaaaaaatcatcttgctctggtacttttcggttatagcaggattaaggccttgtttagttgcattcaaaaacctaaaaattttcaagattccccgtcacatcgaatctttaaacgcatgcatggagtattaaatatagacgaaaataaaaactaattacacagtttggtcgaaattgacgagatgaatcttttgagtctagttagtctatggttaaacaataattaccacaaacaaatgaaaatgctacagtgtcgtgaaattttttactttcgagaactaaacaagggctaaaaaggtagacacagatacgtgtacacccaacctgtgtttcctcggtcagccgcagccaacagaactacgtagttcctcgtctgtcacgcgccgtgcccgtgacctagtgcgccaagtgcgcatcctttccccttccttagaaaaaaagcgaagcgaccaaactctctaagtttcctcttcctctacacccccaacaggccaacaacaatcacaaccctctctccctctctccttcgcgtcgctgcctctgaatccccacccttcgctcctccgccggcctcctccgcggccgatgtgtgtgccccgccagcccaaaaccctagaggtacgcgcgcgcccagctttcccacccccttcaccggccgccatgccgccagcgctccccgaccctggcggtcggcgatcggacctggcggtctagggttttcgcgggatttttattggggattctaatcttattttcgctgatgggttttggtggttgttgttttttttggcaggtgacgagcaggtaaggggttccggtcggagatggcggcggcggcggcggcgatggccgcacatagagccagcttccctctgcgcctgcagcagatccttgccgggagccgcgccgtctcacctgcgatcaaggtcgagtctgagccggtgagtctccggttctctttcccgtcacccgaatccggctgctttgcttgccgtccttcgttctaggtgattcgtgccccgaatctggctgctttgcttgccgtgtccttcgttctaggtgattgtaacgggcgacttgcctttcatggtcttggataaaactaattgtctattggtatctcaggttagggtttagtttatctgttgtgggctcgcttgtgatctctcttagggttggtagttagtgctgtttggtagaatctctattgcttttggaacaactttttcttgtagagcttttctggttgtctagagaatcagcttgaatctatgtttttggcaacactgattatcctgaagaaattatctgtcatgagtgtgtaatgacatgaatgcccctagtgctgatgatgatttgtttggttgataagtaagcggctaaaccatttattgccttttccccctacatttggacccataatcctataagtttataattttgcatagcaatacaacatgacgtgaatatgcaaatatgacatgagttaatagaattgtcactcacgtgatattattacataccaaatctaatctcaacaaattcacaagaaaaattcagatttgaagggataaaaaaaatcgaattaagccatcaaataacaattgtagcttttttttcatcctcaagccgtgtgtgtcaatgcttaaaacgatttagtagcaccgaaaaaacacaacaacttcacatgtcaatagcttcatatacctatgcaaagatgttagaactggaatagatcatactgtttcttactcattgcaccaatcatcaccaagtactaccacttgtaggatctcccttgaggccaaaggcattcaaattaattctcttccatgttccattgttgtatcccaaggagttccatttagtttttaaatgcaggcgacaatagttcttatttatgcgtgcattgaatttggcctccaggttagagaacccagctgtattcagacatctcccaaatccaatattacgggcaactacttctaggcaaatatctatgaaaatattgtcttggcccgcatccaacattgcttttctgtttcctatctgcaattttatactccaaaaaatcattttatgtctttctgatattagtagcgcacagtaggatggagaggagaaatatatgcatatgaatacatcagtgcgtaagcttatttccaaaccacgactcctataatgcacagatccaatcattagatggttcatcaagcatcaccggcatccaaggttacaaaaggtactaggcgatctctaggcccaccctctcctagagcttagatgagctaggtgtttacattttatacccatgcatatttacccctaaaagtctaatctaaaataaaagaagaaacaggagatcgtgggccatgggttatatagaaaggcccatgaaaacaggcccaagcccaagtttgaagagcaaaccttatcctaacctcccctcccaccttatcaatttgtgctgctcccagcttggccgcacaagtcatgactcgcaactgactgtgccgtctgctgccttttggaacactgccagcatctttttactttttttaaaggagaacaacacctatgtgagaggatgttcaatggaggcgtgagaaaagcaggaacatatataccttgaaagctgaacgggatgtggcaaagttgcggctgtagtcgtcgctggccgatctcacttgttgagggctggacggagtcgttggatctggaggttcacgataggcagccaccagtcaccgttgaggggtcagatctgatggaagtggtgctggcgttttcttagctggtggagtcaccagggagatgcggcacccctgcgagtggcctagtgtgagcaattggagtgcatggtagggggaaaggtgtggtaagccttttatgtgatggcaatgatggaaattctatcaagttcatgcgcaatattggaacatgaaacttcacaatcggtgggattttccccaacacttgcagccagcggcttccgctcatgtgcaaaaggtgttgggggaagaatcgtgggcggaagaagcatgttcagaagcatgctgtttgggggagttggtttgcttttttcaaccagaatcccctaagaagtggctccaaacatggccttagttcttttgtgaagtcatttgcccttaagggtgttctgttgtaatgatgctataatgtcagtcataggttttactttctgatttagtgggctctctttctgcctgtgtccttcagttgctgcttttctaggtttaatgagttttagtttcctttctcactttgtgttttgggtctgttcttctttgggcatttagcattctttattggtcttagtcaattatttatccaacccaataattttgagtcagcagatgccgtacagtgcaatattatggttgaggtctgtatgaacttggtcgatgccagtagttctgataaatttgtataacaattgtaaaacatatcacggtttgatataacaattgtaaaacatatcacggtttgatatttttactcccagtttggttgctctataacactgtcacatctacttctggtttcctggtgacaatgatcagtttgttgccacatgttcttcaaggtgatttatggccagcgtggtttatgcatgtgatttggatgcctattctgaaacataacaatgcatagttgtgagacgtggatagcatattataattggtactaaacctgatttgtaactgttgttgacggaacttgctttttactgcaaaattctacttttaccaattatgtggggagtgttcctcttttggttcgacattcgttatccttggtgcacctgtgaagacaactctttgctgatgaattatcctgcatgtgtttgcattgcagcctgcaaacgtcaaagcatttattgatcgagtcatcaatattccactacatgacattgccataccgctatcaggcttccgttgggagttcaataaggtgaacttttcaaaaggactacccatcttatgcttttcacttgcttactttgtgtttgtagcttactttacgtacttggaattggaaacagggaaatttccaccattggaagcctttatttattcattttgacacatatttcaagacatacatttcttatcggaaggatcttcttttatctgatgatatgactgaggctgaccctatgccaaagaatgccatcttgaaaattttaagagttacgcagattgttttggagaactgccagaacagaagttcttttactggtcttgaggtgagcttttgtttgtgctgttacctgtttgtgttctttataatatgtgtgatataaccacccatgttttttttgttcagtttgtgttaattttttctgtttctttgtcagcatcttaagcttctcctggcatcgtcagaccctgagatagttgtagcagctttggaaactcttgttgccttggtcaaaataaatccttcaaagttgcatatgaatggaaagctaattaactgcggatctataaacacccatcttctatcattggcccaaggatggggcagcaaggaggaaggtctaggcatatattcttgtgttgtggcaaatgaaggaaaccagcaggggggcctgtccttgttcccaggagacttggagaacaaatatggtggcacacagcatcgtcttggttcaactcttcattttgagtataatttgggtcctgcacagtatcctgaccaaactagtgacaagggcaagccatctaatttgtgcgtgatacatattccagacatgcatcttcagaagggggatgacttgagcatactgaagcaatgtgtggacaagttcaatgtgcccccagagcacaggtttgctttgcttacaaggataagatatgcccgtgccttcaactctgcacggacttgtaggatctatagccgcataagtcttctttcgttcattgttcttgtgcaatccggtgatgctcacgatgaacttacatacttctttacaaatgaaccagagtacataaacgagttaatcaggcttgttcggtcagaagattctgttcctgggcccattcgtgcactggctatgctagcactgggagcacaactggcagcatatgcatcatctcatgagcgtgctaggatattgagtggctcaagtatcatctctgctggtggaaatcgtatggtcttgctcagtgtcttgcagaaagcaatatcctcactcaatagcccgaatgatacctcatctcctctaattgtcgatgcccttcttcagttttttctgctccatgtactgtcttcatcaagttcagggactacggttagaggctcagggatggtccctcctctcttgcctcttctgcgagataatgatccttatcatatgcatcttgtctgcttggcagtgaagactctccaaaagcttatggagtacagcagccctgctgtttctctgttcaaagacttgggtggcgtagagcttttgtctcagaggttacatgtagaggtgcagcgtgttattggtactgctgatggacataattcaatggttactgatgcagttaaatcagaagaggaccacctgtactcccagaagcgattgattaaagctttgctcaaggctttggggtctgctacttattcccctgggaatcctgctcgttctcaaagctcccaagataattcattacctgtctcactttctcttatatttcagaatgtagaaaagtttgggggtgacatttatttttcagtagttactgttatgagcgaaataatccataaagatcctacatgctttcctgctttgaaagaacttggtcttccagatgcttttctctcatcagtgattgctggggtagtaccatcttgtaaagcccttatctgtgttcctaacggcctgggtgcaatatgcctcaataaccaaggacttgaggctgtcagggaaacttcagcattacgatttcttgtagataccttcactagcaggaaatacttgataccaatgaatgagggcgtggtccttctagctaatgcagtggaagagcttcttcgtcatgtgcaatccctgagaagtattggtgttgacatcattattgaaataatcaataaactaaattcatctcaggaagatagaaacaatgaaacagccatcttggaagaaaaaacagatatggacactgatattgaaggtcgtgatttggtaagtgttatggactccagtgtggatggcagtaatgatgaacagttttctcatctgagcattttccatgtgatggtattggtacaccggacaatggaaaactctgaaacctgccggttatttgtagaaaagggaggtctacatgctcttttgacactcttgttgaggcctagcattacacagtcatctggagggatgcctattgctttgcatagcacgatggtgttcaagggatttactcagcatcactctactccacttgcacgtgcattttgctcgtctttaagggagcatttgaagagtgcgttgggggaacttaataaagtttccaactcatttgagatgaccaatattgaaaaaggagtgatcccatctttgtttgttgttgaatttttgctattcctagctgcctcaaaagacaatcgctggatgaatgcgttgctctcagaatttggcgatgccagcagggaggtcctggaagatattgggcgagttcaccgggaagtgctttggaaaatttcgctttttgaagaaaacaagatcgatgctgaaaccagttcatcttcttccacatctgaagcccagcagcctgacttgtctgccagcgacattggtgatagcagatacacttctttcaggcaatatcttgatccaattttaaggagaaggggttctgggtggaacatagagtctcaagtgtctgatctcattaatatttatcgagacattggccgtgcagctagtgactctcagagagttggttctgatagatattctagcctgggtttgtcctcaagttcccaggaccagtcttccagttcatctgatgcaaatgccagcacaagatcagaagaggacaagaaaaaatctgagcattcctcctgctttgacatgatgagatctctctcgtaccatatcaaccatctttttatggagcttggtaaagcaatgcttcttacatctcgtcgggagaatagtcctgtaaacctatccccatctgttatatctgttgctaacaatattgcttctattgtgttggagcacctcaactttgaaggacattcggtaagttccgagagggagatgactgttaccacaaaatgcagatatcttgggaaggcagttgaatttgttgatgggatattattagaccgtccagaatcctgtaatccaattatggcgaattcattttattgtcgtggtgtcattcaggccatcctgaccacatttcaggccaccagtgagttgctcttcacaatgagcaggtcaccgtcttcaccgtcttcacctatggagatggatagtaaaaccggaaaggatggaaaggagatggattcttcatggatctatggtcccctcaccagctatggagcaattatggatcatcttgtgacctcatcttttattctctcttcatcaactagacaattacttgagcagcctatttttaatggatctgtaaggtttcctcaagatgctgagaggttcatgaagttacttcagtcaaaggtgttgaagacagttcttcccatctgggcccatccccagtttccagaatgcaacattgagttgattagttcagtcatgtccatcatgaggcatgtttgctctggggtggaagtgaaaaacactattggcaacggtggtgctcgtttagctggtccacctcctgatgagagtgcaatttcactgatcgtagagatgggtttttctcgtgccagggctgaagaagcattaagacaagttggaacaaacagtgttgaaatagcaactgattggttattctcacaccccgaggaaccacaagaggaggatgatgaacttgctcgggcgcttgcaatgtctcttgggaattctgatacacctgcacaagagggagatagtaggtccaatgatcttgagctggaagaagtaacagttcagctgcctcctatagatgagatgttacattcatgtcttaagctacttcagacaaaggaagcattagctttccctgtcagggatatgcttgttactatcagctcacagaatgatggccaaaaccgagtaaaggtgcttacatatttgattgataatctgaaacaatgtgtggtggcatctgagccttcaaatgatactgcattgtctgctcttttacatgttcttgctttgattctccatggagatactgctgcccgtgaagttgcctcaaaggcaggatttgtgaaggttgctttggatctgcttcgcagctgggagttggaacctagggaaagtggcatgaatgaggttcctaattgggtaatttcctgtttcctttctgttgaccagatgctacagttggaaccaaagttgccagatgttacagagctatatgtcctgaaaatggataactcaaatacaaaaacatcacttgtgattgatgacaacaagaaaaaagatccagaatccttgtctagtgttgggttactagacatggaggaccagtatgaacttttgaagatctgttgcaagtgcatagaaaaacagttgccttctgcttccatgcatgctattcttcagctctctgcaacactgacaaaagtccatgcagctgctatatgttttcttgagtctggtggtctgaatgcattgctatcattgccgacaagtagcttgttttctgggttcaacaatgtggcttctacaataattcgtcatattttggaggaccctcacacccttcagcaagcaatggaattagagatacgtcacagtcttgtcacagctgctaatcgacatgcaaatcccagggttaccccacgcaattttgtccagaatttggcatttgtcgtgtatagggatccagtgatatttatgaaagctgcccagtctgtgtgccagattgagatggttggagatagaccatatgttgttctgttaaaggaccgtgagaaagaaaggagcaaggagaaagataaggacaagtcagttgataaagataaagcaacaggtgcagtcactaaggtagtttctggggacacagctgcaggatctcctgcaaatgctcaggggaaacaatctgatttgaattcaagaaacatgaaatctcaccgcaagccaccaccaagttttgtcacagttatagagcatctcttagatctggtgatgtcctttgttccgcaacctcgtctagaggatcaagctgatgttgtctctggtaccgccttatcttcagacatggatattgactgcagttctgcaaaagggaaagggaaagctgtgtctgtcccacctgaagagagcaagcatgctatccaagagtctactgcatcccttgccaaaactgcatttttccttaagttgctgacagatgtattgttaacttacgcatcatccattcaagttgttcttcgtcatgatgctgatctgagcaacatgcatggtccaaatcgaacaaatgctggtctaattagtggtggaatctttaaccatatcctgcagcatttccttcctcatgctacaaggcaaaagaaagagagaaaaagtgatggagattggatgtataaattggcaacaagggctaatcagttcttggtggcttcatctattcgttctgcagaggcccgaaaaaggattttctctgaaatctgcagtatatttcttgatttcaccgactcgtctgcagcttacaaagccccagtaccaaggatgaatgtgtatgttgatttgctgaatgatattctgtcagcgcgatcaccaactggctcctcgctgtcagcagaatccacagttacatttgttgaagttggtcttgttcattcattatcgacaatgcttcaagttcttgatttggatcaccctgattctgcaaagattgttactgctattattaaggccctggaactcgttagtaaggaacatgttcatttagcagataatgcaaaaggagataactcgtcaaagattgcttccgacggcaaccatgtgaattcatcatctaatagattccaggctcttgacatgacttctcagcacacagagatggttactgatcacagacaaacgtttaatgctgtccaaacttcacaaagttcagattcagtggcagatgagatggatcatgatcgtgatatggatggtggctttgctcgtgatggtgaagatgattttatgcatgagatggctgaagatggaactggtaatgaatctacaatggaaatcagatttgaaattccgcgcaacagagaggatgatatggctgatgatgacgaggacactgatgatgatatgtctgcagaggatggtgaggaggttgatgaagatgatgaagatgaagatgaggagaataacaatttggaggaagatgatgcccatcagatgtctcatcctgacacagatcaggaagaccgtgaaatggatgaagaagaatttgatgaggatttgctagaagataatgatgaagatgaggacgaggaaggagtcatccttcgcctggaggaggggattaatggcattaatgtgtttgaccacattgaagtttttggtgggagcaacaatttgtctggggatacaatgcgtgtgatgcctctggacatttttggtacaagaaggcaaggccgaagtacctccatatacaatcttcttggcagggctagtgaccatggtgttcttgatcacccacttcttgaagagccttcttcaacattgaatttttcacaccaagggcaaccaggtatctcttaccttcattaccacctacgcccatcccaaattacatttttaatttgtcaagaacctgctattgttatttgcctaatcctcctagcctgataatggcagtagtatgtagatagtgtcatgtcttgcatacatgattgattcgtaatattattattattatttcttcagagaatcttgttgagatggctttctctgatcgaaaccatgagagtagctcctcccgtttggatgctatattccgcagcctgcgaagtggacgtaatggacaccgctttaatatgtggctagatgatggtccacaacgcaatggatctgctgcccctgcagtacctgaaggcattgaagaattgctgatctctcatttgaggcggcccactcctcaacaacctgatggccagacaacacctgttggtggtactcaaggaaatgaccagcccaaccatgaatcagatgctgaggcaagggaagtagcaccagctcagcaaaatgagaactgtgaaaatatagtgaatcctgtaggtctgtcagaaagtgctggccttgcacctgacagtgatgcacttcaaagagatgtgtccaatgcaagtgagcatgctacagagatgcagtatgaacgtagtgacgctgtagcacgtgatgttgaagcagtgagccaagcaagcagtggcagtggtgctactttaggggagagcctcagaagtttagaggttgaaataggaagtgttgaagggcatgatgatggtgaccggcatggaacttcaggggcctcagaacgattaccttcgggtgatattcaagcagctgctcgatcacggaggctgtctggaaatgctgtgccagtaagcagtagagatatgtctctggagagtgttagtgaggttcctcaaattccagaccaagaacctgaccagactgctagtgaggggaatcaggagcctatcagagcggcaggtgctgactcaattgatcctacatttttggaggcccttccagaggacttgcgagctgaagttctttcttcgcggcaaaatcaagtaactcagacttctaatgaccaacctcagaatgatggtgatattgatcctgaatttcttgctgcacttccccctgatataagggaggaggtgctagctcaacaacgtactcaaaggatacaacaacaatcacaagaattagaaggacagccagttgaaatggatgctgtttcaattattgcaacattcccttcagaaattcgggaagaggtataactgttttcaattcctgtcccatttcagatgtttttatctaattgttttattatggtctctttacatattctattctaattgcaggtgcttttgacatctcctgacactctactagctacactcacgcctgcactagttgctgaggctaacatgttaagggagagatttgctcatcggtatcacagtagctccctttttggtatgaactccaggaacaggagaggtgagtcctcccgacatgacataatggcagcaggacttggtagaaacacaggtgatccctctagatcaactagcaagccaattgagactgaaggtgctcctcttgttgatgaagatgcccttaaagctcttattcggttacttcgagttgttcaggtaatagtactgtttcttctatgcactctgtttttttatcgaatgctgggaatacttattgtaattgcctcttgcattattatttgcagcctctatacaagggtcagctgcagaggcttcttgtgaacctttgtactcatcgggatagcagacaggccttggttcgaattctggtggacatgcttatgcttgatctgcagggcttttcaaagaaatcaatagatgcacctgagtcaccctttaggttgtatggatgccatgcaaatatcacatattcacgtcctcaatcttcagatggtaattaagtgttttcatctttcttcattccttttagcaggttacattccctaattttctggtcttttaatttgcaatgtattttaatgcatggattctctttgttgccttaaataggtgttcctccattagtctcacgtcgtgtgcttgaaacgctgacaaacttggcaagaagccatccaagtgttgctaaactcttgctctttcttgaattcccttgcccatcaagatgtcgcccagaagcacatgatcataggcgtggcaaggctcttctcctagaagatggtgaagaacggaaagcctttgcgcttgttcttctgttaactctgttgaatcagccactttatatgagaagtgtagctcatcttgaacaggtgagttatcttttcttttgggtatttcatttaacattttggctcgcagttttcttatcattttgtgacatgtgcagttactaaaccttcttgaagttgtcatgcataacgctgagaatgaaattaatcaagctaagctagaagcatcatctgagaagccatctgcacctgagaatgcagtgcaagatggtaaagataactccatttctgaatcatatggatcaaagtcgaatcccgaggatggtagcaaagcccctgctgttgacaacaaaagtaacttgcaagctgttttgcaaagtcttccccaaccagagcttagattgctatgttcattgcttgcgcatgatgggtatgtgtgtggatgattttcttcagtgatttgtacagttaattattattttcttgtctgctaattcatgatctgcctcgtgtacctttttttgttggatcattctactttcataacctttttggctgttataaaactgctctacttcctttgtggttcaagaaaaaaatatgagaacaatgctctgttcttttgtactgttttatactctatcaaattatcttacatcagtttttttgtttcactgtattcttttttattacctaatgtgatggtggatggaccttttctcattttcagattgtcggacagcgcttatctccttgtaggtgaagtgttgaaaaagattgtggctctggcccctttcttctgttgccatttcataaacgagctggcacgttcaatgcaaaacttgacacttagtgcaatgaaggagcttcgtttgtacgagaattctgaaaaggctcttcttagctcttcatcagccaatggtactgcaattcttagagttttgcaggctttgagctctcttgtcactactcttaaagagagaaaggatccagaacagcctgctgagaaggaacattcagatgcggtttcccagatttctgaaattaacacagcattggatgctttgtggttcgaattgagcaactgcataagcaagatagaaagctcttcagagtatgcatcaaatcttagtcctgcttctgcaagtgcagctacattaacaacaggagtagcacctccattgcctgctggaactcaaaacatattaccatatatagaatcattttttgtgacatgtgagaagttgcgtcctgggcaacctgatgctgtacaagaggcttctacttctgatatggaagatgcttcaacatctagtggtgggcagaggtcatctgctcaagccagtcttgatgagaagcaaaatgcttttgtgaaattctcagagaagcacagaagattgctgaatgcattcatccgtcaaaaccctggattgctggaaaagtcattctcactgatgttgaaaattcctcgcctgattgattttgacaataaacgtgcatatttccggtctaaaatcaagcaccagtatgatcatcatcatcatagtcctgttagaatttctgtgcgtcgtgcatatattcttgaggactcctacaatcagcttaggatgcgctctcctcaggaattaaagggtagactcactgtccattttcaagcggaagaaggaattgatgctggtgggttgacaagggaatggtaccagtcactatcacgggtcatttttgacaagggtgcccttctgtttacgacagtcgggaatgatttgacgtttcaaccgaatcctaattctgtgtatcaaactgagcacctctcatacttcaaatttgttggacgagtggtgagttctggtgctcctatttatgtgtttgtatatattacataatgcgagtattattctagtttctgaagtttacattacaccaggttggcaaagctctcttcgatggtcagcttttagatgcccattttactagatctttctacaaacacatacttggagtcaaggttacataccatgacattgaagccatcgatcctgcgtactacaaaaatttgaaatggatgctcgaggtatgctgtatgctttacttacacaagttatgctgcatgttccttgtaattttgtcgacaattgatcattcagatgtaaccttctctattttctgtttgtagaatgacataagtgatgttttggatctcacctttagcatggatgcagacgaagaaaaactgatattgtatgagaaggcagaggtatttgctgtgcttgtgtcacaaggatttgtggtctcaatcttttctatgatctaagtcgtaagttatccttgcaggtcactgattgtgagttgattcctggagggcgtaacatcagggttactgaggagaataagcatgaatatgtcgaccgggtagcagagcatcgattgaccactgcaatcagacctcagattaatgccttcatggaagggtttaatgaactcattccacgggagctgatatctatcttcaacgacaaagagcttgaacttctgattagtggtcttccagatattgactgtaagtgttgcaaatatatggtttagggttgttagtctagttatgtatccatctaattgacctgttttacctatattgcttttagtggacgatttgaaagcaaatacagaatattctggctacagcatagcctctccagtaatccagtggttctgggaaatcgttcaggggttcagcaaggaagacaaagctcggttcctccagttcgtcactggcacctcaaaggtattccttgcagtactgattcagtttctggattgtcattccagtctgcacttctagcaagcttacagtttgttaactgccacattggaatctatgatgccacaccatgtgttgtgcttaacatttgagtttatctgtaggtaccgttggaaggttttagtgcacttcaagggatctctgggccccaaaggtttcagatacacaaggcctacggcagcacgaatcatctgccttcagctcatacttggtaacctatctgcttattttgcttcgtttcacttaccgtgaaagattttgcagccaccatgtctagtttactgacaccaggccatctttgctaaattcagctttaaccaactagacttgcccgagtacacatccaaagagcagctccaggagaggttactgttggcaatccacgaagcaaatgaaggtttcggatttggctaatcagtcatactcgtttgtccgtgcctatccgtgagatctgtatagatactgagaattgcaataggcgagcagcacgtgtgtgctgatttccttaccaaattctgaactccacgtgtgatgagaggaatggacggggggaacatgtccaggatagaagaatgtccgtgggggaggtactgttgagagatagagactattttgtgttcataatattcattactcttttagcttctttcggtcgtcggcccctttcgtagtttttgcctttcactgttgctccgaagatttttccctgcctttcgttcatagactggtgtacgttgtaacccaacagtatgtcaaatgcaagtcatcttacgcagcaattttacatccgcctaatctgttgaaactactgtaaattcagaagccatatttatttccaataatatacagcgaaaaattctctttcgtctctctttcgcgctcccaatacacgtctgttcctttcattgcgtcgtccacgtctgttccttccattccgtcgtccttcgtcacttacactctatacgtgtgagtggcttcaaatttccttaagtttaactaaactctgtgatttgaacttttaaagagggacagacttcacatcacctccaagtatggcaggattggctaatgagcaatctacaccagatctgatctgatgaggacggtccagctcaatagagatctattggcatcagctatgtcaggattccagaattgtcaagttcctcccaattggtggggatatggtatgcctgcaaagttttttgccaataattctggaacatctcacataactgacttagcagggaagactcccatgccatcggcgccttcagtctcgccgatgactcaagtgcctcaatattccacgacaactactataaggccatttggtgggaattttcagacaccaacattccag

SEQ ID NO: 4868 - DNA, 6554 bp, Sorghum bicolor
tttgtttgtgacaaatattatccaattatgaactaactagcatcaaaagattcgtctcgtaatttccagctaaactgtgtaattagtttttgctttcgtctatatttaatgcttcatgcatgtgccgcaaaattcgatgtgacgaggaatcttgaaaactttttgctttttggggtgaactaaacaagaccttatttgtatttctattaagactgtgttttgttgagtttttgaaaaatatttctagtgctaagatggatatggtaccttatattttaggaaggaaggagtaaacagcaagtggtttatagacaacaaaaaaaaggagacaagtgtttctttaggagcccgttcgcttgttttattagccgtattttttctgccagccaacagttttctctcacgatgaatcagcgaacagtatttccaggtatgactttttatttgcatttaatactattacaaatcagcagatttgatgactttccatgttaattatgaacaaagagatataaagagtctatggatgaaacatattatcacaattacccacacatagggatggataacgagccaactccattttgttcatttttttcaaattgaatcttatttatcatgacctcgagagttaccgaagactcaactttaaatggagcctgtcgagctaacccaaagtcgaaagtcactcaaaatcaatccattgttactttaaaagaaaaatgagttcaattaaagtattttgaaacgagtcaccgaaccagtatagaagtggacatgacagtcttaccatgacactcaactcatcattggctttagtaggaggagaaagggaaattgaaatcatttaatgtcttgggagcagagaaagtttgaagatgaaataacttgacctaggccttgtctagtcgaggaggtgaaaattttagatattgtaacactttcgtttttatttagtaattattaaattatagattaactaggctcaaaagattcgtctcgtaaattacaaataaactatataattaattatttttatctatatttaatgtttcatgcatgtgccgcagaatgtgatgtgacggagaatcttgagaagtttttgagtttttgggtgaactaaacaagaccctattgtgagtgtcttgggaaaagagaaaggtacaatgtaaagtgacttttagtgggctcataatgtaaactttaaagacaagtagacaagtgactataatacactcaccatagatgctattaaagtagagaagtggctataacaccctcaccatagacagtaataaagtagagaagtgactataataccctcaccataccatagatgctattaaattagatgagcgactataatgacataccatagatgctatttgaaatagagtcacaaagagcataatgccattaacgccaaaagcaaccaatatcaataaggccttgtttagttcacctcaaaaccaaaaacttttcggcacatatacagagtattaaatatagtcaaaaacaaaaactaactacacagtttgtctgtaaatcgcgagatgaatcttttgagtctagttagtccataattgaacaatatttaccacaaacaaacgaaagtgatacagtagcgaaatttaaaaagttttcacatctaaacaagacctaagtaattaaaaaaataaagtaattatcattatccttgttactataattttcttctactatttccaaaaaaagtagagtaaagataacactattcaatctgtactgacaatctcatttgaacgaggttcaagaacttccggttccgccagcatgcagtccgtgcttgcttgcatagcagcaggctagtagcctcaggtcatgtgttgccctctctctcccccccaactgcggagaggaggggcagaaccgtccatcaaaaagagagcaacagagcaggggaagcaaacaaatgccccgtcttcctctgctctgcccccctctcacctctctctctcctcgtttcatctccttccagcgcaagccttgccttgccctcaaaatccctccctcagaaactcatcgcctccaccacgaccgccttctctccccaattctcatctccccggcggcgcgccctccccagaggccgctggatcgcgcggcggcggcggcgctcctgctaatgcgcgtgctcccctgaggcttttcctggtaatcatctactactactacctccccctccctgtggccgcgtctcttgtctgggtcgatcggggctcggtatatctctctatcggtttggtcgcgcggttggttcttggcaagatcggggtttttttttcgcggcgggacccttcggtcctcggttcttggtgaggcgttctcgtgatcgggggtttttctcggggtttttcgcgatcttggcgtgtgcgggtgggtttcgtggcatcggattgcggcccgtttcaccgcgcattttttttggccatctttgcgcgagcgattcagtagcgaaatctcatgctctgctcaccaagattgttcacggttttgttgtgtttatggattcttttggattcttagagttggtttgtccttcttgccatctggatacgaaaattctattgacatgtggcgattcccctgttttccccggacaccctgttgtctcctgctcttgtcttcatgccaaatcgttcgtatcaatgcttgcctttatttggtaacgatttttgtccttgttcctgtgttcatgtaggtgattccgtggtattcgtgcgtcacatccaactctgggtgccgtagtgttgttgaatccacctacattgtgtgatcgagtttggcttcgtggtattgggatggacgaagtgccgggtaatcaggacaatcagccatttcttggcaacatcactggagccatgtttgcaaatcctggggaacaatctgcagggtgttcttccctcgaggcagggtgggttcctatgagtgaaagaagccctgctcggaatggtctgggcaccatttacaatgccaatttgtttgatgatcagtcattggcatctgcatttgagaacatgagcttgagcttcactggtagtgctgctgactcttctgctaactctggtaatgttggatccagggatgggctccgttttccagactatttgtttgcatcagctgacaacccaacaaatctgccacttcagtcagcatttggtcaggatgagtttgtgccttcatgtttgatggtcaacaatgctggacacatgagaccaaagtttggtgcacaaaatcctccaatgtacacagggatgcatggcacagataatgcttttttggttagaaccaatttatcacaagctttgcctttccagcaacatctcattatcgataggcagccacaagcatatgcaccttattatcagcagcagatgaactctacattcaagcggcatgatattgatgtcgagatgaaatttatcatgcagccacagtgttcttatcagcaaattccacaggctcctgatgttcgttggatcaatagcaatcaatatggtgttatcaactcatcaaccaagtatgcagctgcacctcaccttagagtgcccactgttcgtcatctaggacatggcagtcctgatatctactggaatggtgctataattcctaatggaagtatccgacagagtttgacacgtatgaataattgtccttgtacaagttatcctgattgcttatgtgaaacctgtgaatactgtcagattcagctatctaaaaagctcaaacattcatttgggctcaggcattcacccaaaggtttgttagaagattgcatctctcataaagtgaaaagttcaccatcatccttggatcctgaagtggccatgaaatctgcccaactgaactataattcagttgatgaagttgttggagaattgtaccacttggcgaaggatcagaatggttgccgtttcctccaaaggatatttacagaaggttctcaagaggatgcccaaaaggtttttgatggtgtaattgagcatatcgatgaacttatgattgatccatttggaaattacttgatacaaaaactactcgagcagtgcaatgataatcaaaagatgcatatactttatgaaataactaaaatacctggccagctagtcaaagttgcatgcaacatgcatgggtatggccgcttcatgctttgatattaattgctttctttttattttcattttataatagctttatactgtttttgaacttaaaaattcaggacacgtgtggtgcaaaaggtgatagaaacagttagtacctcagatgaagtgtccatggtagtatctgctctgagccatggtgccattactctgatgatggatgccaatggcagtcacgttgcacaccgttgcttgcagaagctatcaccaaagtgcaaagcagtaagacatttttactttaatccaatgtagccttactcatgcctttaatgttgtctgactgtctctaacttccttttatcagctacatattgttataattctttactctgctacatagaactaaatatccagtatagttagagcatgccctagtgttataatctcacaacattctatattgctggaatttaatctgattcttgctgcacatttgaaacttgcagtgcttctaattgtcttaccaagttactttaatcagcatggtctatgatatcccattcctgaacatttattggctatctgtatttgaactatcacttgactttaaaattttctttgctatacatgtctccaagatttctagtactgtcatcgaaattaatttataatgtgctctccaatgaattattttttggtggaacatagtactaaagatgtttgaattaaccatagggtgttcaattagagcaaatgttaggaagtatagccatgagttcatgctagttgtatcgaggaacaagaaaaggataatataaatgtacttaaccactcctacgtatttctttgctatcgttattaccaatttgtttgtaaactcgattttggtctactattaccatcgcagttccttctcaatgcggccacaaaatattgcgttgagctagcaaaggatcggcaaggctgttgtatcatccagaaatgtattattcatgcaaataaggaacagaagaacaagttgttgtacagtatcacaggtcgggctctcaatctcgcagaacaccagtatgggtatgtatgttgccttttgccttcagagttcatgttactttgattcctttgcagccttggctttcgaatgctgatcatatgaatgaatcactgcaggaactatgtaatacagttcatactcgacctcaaggttacttgggcaatgaatgaaattctggacaagcttgagggtagctatggatacctgtcgatgcaaaagtgcagcagcaacgtagttgagaaatgcctgaaagaagcacgggggccaaaacgtgcaaagatcatccttgagcttatcaacgaccccaagctgcagaatatcttgcttgatcagtatgggaattatgtgatccaaacagcattccgggagtgcggggtaaaatacaatgtgcacagcatgatgtttttgtttttaaaactcaaacatgtcgactagtttctttcttaaactgaaattaatttataacgtgcaggatgctgcggttgaggctgcattggtccgagccatcaagccacacatcagcgctcttcgaaacaacatgtttgggaagagaatcctgtcgaaaacctgcctgaggagcaggaagctctaatcccacacctcctcaagatgtcctatggagttggtctcataaggggcatcgctgatgtacaaattctgtaataaagtagtatatgtcacgggataggtcgtcgtgaaaccgagtagactcaggagaaatggatgaggagagtagtctggttggaggaatccacattttgggccattgtagaacaatcctaagcgtgttgtagttgtagagttgtttgggagagttcgtgcaaataagtatattattacttcgttggtaatctgtcagatgatcgtctgtatcttgttttatggtaatcattgtatgcttgagatgtaaaaatttcatactcattggatcaagtatgattgagttatagacttcatttaggtttatgcttaataattttaaaataattagaagtgtgtaaaagtagaaaatgtatgttctctgtcacaacatgattatgttaagtgttcaaattttctattgttacccacttttaactatttaaaaaccttttaataagcataaacctaaataaatctataactcagtcatacgtgatctaatgagaacgaaaattttagtacatctcaaacatacaatggttagtctacgataaatttctccacaatacgaccacaaaactgtagctatgattaatcatagaaaaccatagatctacagttagagcaaaactttcgtaataaaacataccatatcatatgtttagtatgtagatctacttatgtgaagttttaaaaatatttttttttatttttctata

SEQ ID NO: 4869 - DNA, 4226 bp, Sorghum bicolor
gaggaatcttttaagcccaattagtatataatcgaacaataattaccaaatacaaacgaaagtgctacagtagttaaagccaaaaatctccacgaactaaaccatgccttatttggtgaaaaattttggaaaaaattttggctactgtatcatttttatttgtatttgctaattatatccaatcatagactaactagatttaaaagattcatctcacaaataacagaaaactatgtaattagttatttttttatctatatttaatgctccatgtatgtgtccaaagatttgatgtgatggagaatcttaaaaaaatttgaaattttttttgaataaaacaaggccatatttcctacgtgtaggatatagaagtcatttaggacaacgacacagttttcaaaacacatctttaaccttttatttttaataaaaaatatttaggaaaaaataatatatgtattacttttgcgaaagtattttttaagacaaatctgttcatataattttcacacttgtaaactcaataatttaaaagttattaatcatttatattcccaatgtttagcctaaactttatcgaaaacggcttctaaatcatatgcagaggctgtatatatattcaattttattttattttatttttctccgcagccagttttatgtttattttttgaaaaaaaaagaaattattttaaagacaaaagtttttatgtttattatttgtgctagaacaaacaattgagaaaagtttagtatcacatgctgcagtggagtggagtcgatgctgcactgcaatatttattggacaatgaaaggccgtttactgtgcactgagctaacgctggtttcagccttcaaggaagtgccaatgcatatgtatcccatcccatgatttttacttcagagggccatgagcccatgactgcgcaatattcagtttgaaaaaaaatggctttatttttcttaggaaaaagacagtacctttattttttcagagtcgtggcaccaattcatggccactcaatgcagcaagcatttttaggccctgtttagtcctaaatcattttgcaaattggtcaaaattgctcatcacattaactcttgcggcacatctatagagtattaaatataaataattaattgcataatttacttgagataattttttaaagtctagttaggctttgttcagttcctaaaaatttttggattagcattttaatttttatttgacaaatattatctaatcatggagtaactaggcttaaaatattcgtcgcgtgaattacagataaactgtgcaagtttttatttttatctatatttaatgcaccatcatgtgccgtaaaattcgatgtgacggagaattttgaaattttttagaaactttttgaaactaaacaaggtcttatttaatgattagacaataattatcaaatataaataaaatcctactgtcgacattttgccaatttttatattttcaaaagggaacaactgccaacgctgcaaatctgtgatgcccgtgtctcgttctccgcgcttaataatgaatgcatgccgagggcggagtcaatcaaaaaaaaaaaacaaatatggtcctggcgcatgcagaagcaaacggactctctggcacccattaaaaagcaccccagaagaaaggcgcctttgcttccctctcgtatcgtagcgacggccttttcttctccgctccgctcagacaagcagcagcaacttgctcctctcgcctcctctagttcttcttccttgtctaggagtaggagtgtaggagtcgtcgtcttcctccacgggcacggagaaggagaaaggagggataacacacacgcatccgccgccatcgttgcttcttcacggcgagctagtattatattcatggaggtaataatctgctctagccaagaagcacacatctcttcttaacttggcttgtccttcatttgataaacgaatgcacgcatgcatgcattacgccgcagcaggggcaaggagggaggaggcggcagatcccggcgttcgggaggtggaaccagcacagcgacgacgacgacgtgcccatcacgcactacttcgagtccgcggtgcaggccggcctcctcgtcaggcccggtggccactgctaccacgccgccgccgccggcgagctggtgctgttcaggtcctccgcctcgccgcctccacacaagccggccaagaaggtactgtactactactgctgctgctagccctagctagcctcctcccgtgagctcatctctctcatcagtgtctgacagtccctcagacagcatgcacaccacagtgcctcctgctttgagcctttgacccttgttttgttgctttctcttaaactgtcttaacggaaacggatggatggatcgtgagatgtgtgtgacacaacacatttttcgtcatcaggtgcggagcacgacgacgatggagagtaacggtcaccaccagcagcttgaggcggggagcaggaggcaaccgcagcggcaggaggcgttcgtggccggcgacggcgggtcccgcgcggcggcgaggccgaggaggccgcgggtcgttagggcggcggtggacgaggacctgtacaaggtgccttccgatatgctgcgcaagaagaaaggggtacctacactaccatttgtttgctcctctctacgagtagtctcttctcttcaagctttggatctaacttgcctagcctcgtttactcgttagtaacggtagattgcgcgtagaaataatgatccacaaatactccaaaataatatactactccctctatctctatcacaaattataagttatttcaagaatcctagagagtcaaagtatctcaaatttgactaaatttatatgataataataacatttatgataccaattaagtatcattaggttgttcgttagttatattttcataataatatctatgatgtcataattttttctgtaatattagtcaaactaggccttgtttagtttgcaaaatttgtggtttttggctactgtagcactttcgtttttatttgacaaacattatctaatcacgaagtaactaggcttaaaagattcatctcacaaattacaggtaaactgtttaattagtttttatttttatctatatttaatactccatgcatgcgactaaagattcgatgtgatggggaatcttgaaaatttttgcgaactaaacaaggccttaagatatttaaattttttaagattttttgaataacttataaattgaaatagattgaatatatggtatgccacatcaaaatagcattgcactttgaatgtacctagtgcatccagcatcagtcgtgcacgcttcaaaattataacacctaatgttgttaataaatataacagtgcttttttttaaccagttgactgcagtataaatcctcctgctttccggttgcgttgcatctgaaaaactgcttactggtacatcagatccaagctataaataaattagtaaaagaaaacaaaatattttaccctctaattaattaattaattaattagttaattctcgagatgatcaccctactgtatttggtgatagtttagtttccagcacccagcaagcaagttgactttaaagctcgctgtactttctcttgtttgtttctctttcagaggaagcatgtgaggagcatgtggatgggctgcgtgggcctcaactgcgtcgcctgaccagacacgacccgacggagcttccgccgtaccggtagccttttcttccagctttttcgcgtcgcatggaaacaagagacacgacgacccggcggccaggacggaccaatgtgcatgcacatccatccaaaagcccagcaactagctgctcctgttccattccatccaccggacgatcgtcagtcaccaccacgtcgtcgtcggacacacaccttgctgtgtgtcgtgctccatgcaccgacgacgtcagtcgtcaccttcttcctgcttgccgtgtggccgtacgtgctcttgttcccgttggacacacagcgagtccgtgttgcttgcaccctgtggacaacgcaagagctaacgtgatgcctgccgtccgtccatccggatgtcgcacatgtacattattgcctgttggtgtcatgtactttacgtatggtatatgggtagctgatgagtttattgtgggcgcgagttgtctgtggtccattgtgggcgcgtgtata

SEQ ID NO: 4870 - DNA, 3351 bp, Sorghum bicolor
agagaaatatatgatttgtgaaaatgttagaatcaccatgttggatgaacaaatgatcaaacaataaaaataaactttgtagatgttgagaagttatgaaattttatatttagcaactttttcatttgagttcatcttgtcatgcaaaattacgtctttatttgaaaattttaaattttgaattttttaaacaatctcagatggaaaaactcgttaaataaactttatagatctcaaaaaattataaaactttacggttgacaattttttgatttaaaatcatttttcatgcaaaaactacagttgaattttccaaatttgaattttaaattttgtaaacgacatcggatggagaaactcgcaaaataaaaattgtagatcttgaaaagttatgaaactttgtagtcaacaaatttttgatttgaaatcatttagggcctcaaacaatcgatttacacgtgatttggtataatatactccctccgtacttataaagaaagccgtttaggacaacgacatggtctacaaagcctaactttgactctttatttttataaaaatatttatcaaaaagtgatatatgcatagttttatgaaagtatttttcaagacaaatctattcatatggttttaacattttcaaaatcaacaatttaaaagttattcattatttatattccaaatgtttgacccaaatctttctaaaacgacttttttataggtatggagggagtatgaggaatcgaaatataatatagacacaagtgatagtgtggtgcagtggttagggaggggtttgaatcccacaggtcatgtagttgaaattttgcgcaaaaaatgtcgcgacttgcaactttggggaccgcccccaaatttttttcttattgttttttaggttttttttgtttctatctttgccgagtgccgggttggcactcgacaaaggagcttttgacgaatagggctctgtccaggcccctttgccgagtacgacactcagcaaagcctttgccgagtgcaaatgtggcattgccgagtgctccaggcactcggcaaaggtagtggtaggactatgtattaagaaagtagtctcagcatttaagattctaaatagatatatatatatatatatattcgatgacaaatttaatatacttatttagtttcataagcatcaacgttttttaaataaatgtggtgaaacctagaagtaaaagatagcacactattctaaaactgtatcacttgagcttatctaccgaacagtggtgtttttttctcacaataaatcaatgtaaaatgaattttctaacgtggctaaatcgaattaggggtagaagctaggtgcagtgaagcatgcagagaggtggctgctaatccatcccacgtcccatctatcgcatgcacatttgggagcagacagggaaaagggcgaaagctcatcctatctgctcaggtcaggaccggatccctcctcgtatgggctatggctacgaggcgccgatacccgcgcattggccgcctgcgccaccagccagccggcaggcaggacgggaatctggctgttcctccgcgccgcgggtcccggcggcctgtggcttggacatccggccactctcgtaccgtacgtggtcgcccaccgctcgcaggcgccgcagccaaccggcggtcgacagcgacgcctcccgcgcagaggagccagccagtgagctcccagatgctactggtcaacgtccgatcgatccagctccagtcccccttcccggcctgcctgggtcctataaataccaaggcttgcctaccacagcgacagtagtgctctcggcctccgcgatccgtcggcttatatatattattagtgcgtgtttcttttaacaatctcttctatctccagcttccgtccggccggccgtccatcgccgccggccggcccgctgctgtgcctgtgccttccaaataaacgaacactggcttgcatatagatagatagatatagagatatgggtcgcggtcgcggcaaggtggaggtgcgtcggatcgacaacagcgtgagccggcaggtgactttctcgaagcggcggcgcgggctggccaagaaggcgcgggagctggccgtgctctgcgacgccgacgtcgcgctgctcatcttctccgacaagggcacgctccaccacttcgccgcgtacgccaggtacgtacgtacgtcgtctgcatgtgctcgcgcgtcgtcgtgcatgaacaagtatatatatatatatatatatatatatatatatatatatatatatatatatacatacacatatatatacatctctatatatatatatatatatatgaatatttctatgtgtgcacgtgacaaagttaatttatttaacctgtctggaaaaattgtgcattgtgttcttgatcttactgtcactctcatttgtaacttttattaggggaacatgagctatgaccacgtcaagatgaggtccaaacttgaagctctacagaagagccaaaggtaacaagttgcaaataattactgacaaaaactgctgataaaaaaacataacaaaagcttgattaatttggatatatatcgaattaaccaagcactctctgaaaaataaaaacgtgttcacttgccacataaatttgaaactcctgttcactcgacatgtctcatataaaagtgtgatgtgaacaatagggccctcacacttgtcatatgcatgcttatccaatgcatgcatgtttcaggaatctcatgggggagcaacttgagtccctgacattcagagaggtacagcagcttgagcaccagatagacagcgctctgaggaacatcagatcgaggaaggtacaagtcacatgcacggtgattgtacacatatgttagaactgttactcatatgtcagtgctcacagttccttttttatgcctgcttttatttcaggaccacatcttgctgaactcgatcgaggagctccaaaacaaggcaaatatgccaaataaagcaattactacctttacatcgttaaaaaaaacagcctttttattcgatcgtaaagtaactagagtgttgatgaattttttatttttaattagttcttcagattgtttagtattgcttgttttggtcctcatgtttttatttgtgggaggtggtggcagtaattggaagttttgtatttttgatccctacttgcaggaaacatttctgatggaacaaaatagcattctagagaaggtaatgaatctccttataatacacctatagagcaaaaaagcatcattggttcagttcctagttaggttattagtttcgaataagttggctaaatatatcatacatgcat

SEQ ID NO: 4871 - DNA, 4266 bp, Sorghum bicolor
cttgggtatgagggagaagaggtggtcgagggtaaagctttctgacgaggctaagatggggtggctctccaaaggcattccccaacaatttgtttattacttgtacttattaaacaagaagattagaggagcatttgtacttattaaatatctccatcaattcttgaatggcattaatgtgatcttctcaagatacttagggaacgtacagcggtggtttgtttgttatctgtgtaatactccgttagtacttccgtccaatttaatgaggtgagagggtgttgccgttgtctcatgaagagacagccaacgctcgtgctccgaagtgaaatcgtttcccaaccactcgttgtatgatctgctgtgcatgggtgtcctgtgttactgccctacctcaaatgatgagatatccacagaaacatacgctttatttatattatattatattatattatattatattatattatattatattatattatattatattatattatattatattatattatattatattatattatattatattatattatattatattatattatattatattatattatattatattatattatattatattatattatattatattatattatattatattatattccccttaaggatttgttttatatcaattagcaacacaactggacatagaaataatattcatgattgatcacaattacaagcaagcattaaacaatttatagtcaaagcaaatatacaacagctgtctgtgggtgtttagccgtctatgttgtaaatcccaaaaacttatagacattagctatctctccattgtacatgcccttatgagctcttccttgccatttttctccacaagtgaaacataacctattagcttttctatatgccttgagggactccatttatcttctagtggcttattgtcaattgctttggacccttccttcttattaacagcccctttgaatttatcaggtggccccatagaacgccatgtcttacgtaatgtctcatttagcactgcgaatcttgtcagtagcaacctcttcttcctgaatcatatcaatgccaaagaatatgctacctctagattttgtgtataatgtttactttgtgactcatttccttagggtccgagagatgatattcgctccccaatagacaatgaggcaagaattgagtagaatttggataggactcgagaaaaatttggggagaggttcagcatggaagacgcccgcgagaatgagtttagatttctgttattatgttcaatggttctgttacaagccgttgcggctgcttataaggcagcacaacaccgtccctgactccttggacccacttgtcataaccgtgtcgtttgtacacgacccacttgtcagccatggctgctcctcctattgtcaaacgtgatgcagcgtgccttccatgcctgcttgcaccgctatcttctcttgtctttcggtgtcctaagaggtgttagcgagacacctcttctagcacctgaggttgggtggggtcgagagggtcccgccaaagacaaccctcaggccacgaaggatgaagcctcgccagttgcttccttgcgtacgggggagaagaggtggtcgaggctgggtccagcttttggaccaggctaagatggggtggcgcgctccaaaggcgtcccctagcaatttgtttattacttgtacttactaaacaagaagattagaggagcatttgttagaaagcatgcatgaaaatggcaatatagctaagaaaacgacgacgtttctctctctcccccttagcatatatacctgcttcatttgacttgttatgattgaagtgattaaataatgataaagagacgtggtgttggcacaagatgcgctaggaagagacggcagcacacttcttgccgccgcgccatctcgtgatcaagcggctacggtcgtctctgtagatcaacccataaatagccgcatcaagcagctagcaagagacagcaaacgagctagctagcttcttgcaacatcacagtacggtacacggtgacttgcattgtgtagcttcgaattctccctgaacaccaacatactccattggccggccacgcatcgatctctcaagtcatccatggaaaacttgctccacgtgaccccgtcccacctatcgctcccgaatagttatgctgtcccgcagctcccgcaggcgaaggcgacccccacagacatcagcctgcccgttatcgacctgtcccgtagccgcgacgaggtttgccgcgctatcctcgacgccggcaaggagtttggcttcttccaggctagtagtggaagacatgcatacattattgcatatatatatatatatatatagccagtaagttttcatgtgctgcatgcatgctctcgcgcaggttatcaaccatggaatcccggagcaggtgttgcaggacatggagtcggtgagtgaagagttcttccagctgccggctgcggataaggcacatttctactcggaggatacaaacaggcccaaccggctcttctccggctccacgtacaagaccagcaaaaggttgtactggatggactgcctccgccttgcgcgcaccttccctggcagcgactgcaagaaagaatggcctgaaaagcccgaggagctccggtaaggaataatatatatataatcaggactagatggactgaactgactatttgttattcttccccaccatgcatatatactgttattctctctgtgataattaatatatataactttaatttcagcacacgtacgtacgtgctattatttgctagtttctttcgtgttggtctgactatttatttgctatgtatatatcgtcgtcgatcgtcaaaatctcccggcagcaatgtttttgaaaactacactgcactaatgagaggcctggggatggagatgctgcatatgctctgtcagagcctggggctcccgtctgactatttcgatgaagaccagagtgccggcgatatgattctcagtgtcatccgataccctccgtgcccgacccctgacgttacgcttggtctgccaccgcactgcgaccggaacctcatcacacttgtcctctccggctccgtgcctggcctccaggttttctacaaaggtgactggatcatggtcaagcccatacgccattccttcgtcatcaactttggcctgcatctcgaggtatatatatacatatatacatagcagatatcttcaagttgactggatcaactttggcttgcattgggttttgactaataacctcttaatttaggttgtgaccaatgggatcataaagagcgttgagcaccgcgtgataaccaactcggtgcgagcaaggacgtctgtggtgataaccataaacggcaccgaagattgcctcattggacctgccgacgagctccttggtgaaaacaagcccccacgctaccgcaccgtcacgctccgcgatttcatgcgcatctataacaaatcccttgagaaccctgatgccgctatcaaagaacgcatgaagcccttcatgatatgatgattttatatgatatgcctgctggttgccttgttctcccacccagacatataggcaaggaataatatcagtttttatcttggctcgtgatccatattgtactagcacacaaaccgtcctccggtgtatgtgctatatatgaagaaccaaaagactcatataagttttgaataaaatataccatctcattgttcttctactacgtactcaatctcattgtttttgtgtttccctatatatatcccatcagaccatttaactcacaatatttgtgtaactcacaatatttccattatattatctcattgttcttctactactcaatctccttgttcatatgttttgttacatttatatatagctctggttccatatagaccgtttaactctcaatctttgtttagctcctgtgtgcgtcgctacgagagacaacgcacgtgtgaggttgctctcagtatcatcaaatggatggagggggcagcgccgagtggtcagcgggtgatatctagatggacagagccaatggtaggacgaggagctgtcgatgtgttaaccaattgagattagggaagagcgggaatgatggaccagcggggtgggtggtagccaattgggaatatagaagagcgggaatgaaagaccggcggaggcatcgctaccagagacgatgcatgcactacacggaaggtttttctggcaga

SEQ ID NO: 4872 - DNA, 6651 bp, Sorghum bicolor
tctatctgatccatgccacataggatatcggattagataaccgtacattggaatgtggagggaaccgttacaagtttaacgagcaaaaaatatatttaggcgacaacattttacttaatttattaatatttatgatattaaataaatatcattagattaattatgttataattttatatatagttttggtcaaagttagcattgattgactctcttgaaatacaagattgaaattttattttgacacagatggactatcctagagattctatctaggtagtagtactttcgctgccgctagttcaacggtgcgagcttgctcggtaagataattttcaatgggagtttcatgacccagtttttaatacactaatatttttttgaaaacagttaagaagagttttatcttcacgaaactttctctactcccctgaaattcttatcatttctctcttcattaatatagtgtcacatcaacatatttaatgtccataaaactctaatgaaactccattaaaactggtctaatatacttcaaagaaggcggaaggcctccaatagactagactgggtaaatgagctattatgtagctattgtgcttaaaaagtatttaataacttgtctatattctatttttctcagctaggtatcccatcattctcgatgaccatatttagctagcgagtcttacttgtctctattgttttctatatatgtgttttttaatttagctagtgcaaaactctacattttagatgagctttctattttacattggctaaatctcacaatttatcatctaattttaccaagtctcttaaagttgctctttacaaatccttaattttaagaatctacataaaagatctcattattccaaaattctatctaaagagagcagattctagtagactttaacatacaaataaagaatccaacaaaacacattagattattgtttagctctaataatccttaaaattcctttagaaccaaacaagacctaattccagttggtctttatctgaaaaggtataaaaatataagtattagatttttttaatctagattcttaaaattcttctagaaccaaacgggagtctgttggcctttattaaaaaaaagtataagagattggccataccttagataatttttcatgtttctctatctctctttcaataatagtcttgattttcaccgtcaatcaatttcgacatcatggatgttttgattacttggccacttctcctaggttcctgaattttaacatgatttcaggcaacactcttatatcactagctaatacaaggaagttattacttttgtaatttattatttgtctttgtgtcataagatgttaaattttagtccttgtcctcctataaacataattgtaaattgtttttgtgtcaacataaatcagacttttgtcgagtttgtggttttatctactgaatttttttattcttggtatcaaaaaatgtagattgtgtctacaaaaattacagtaaacggaatctttaattttagtataaaatatatgccatagaggtgagtatatttacattataaatatctacgttgtgccgtgtaattctaaaaaaaactaaaattcaggcatctgtactttagcaagtcccttatttgatacagaaattcggctcaaattccttccatgcgaccataacttttgctagacaaaaatgtgctccatatagtactgcgtggaatattttgcaaaaaggcaaaaatgttagagtccaggggtctaatcgtgaaagcgaagacgtttgattccggcacctcgacacaagcaatccacgcggcggccgccaacgccgccgccgtcatccccatggttttccaatttccatgctcggttcccagccggcgattccatttcagtgtccttcctcctctcgagaccttgccccatcccagcccaacgctcggtcgatcaactgattagcttggcggtgtaaccctgtcgtgggcgatgagctcctcgccggtgaccaccgccgccgcgtcggcggccgtggtggcgctggccgtcgccaaccgcgtgctctacaagctcgcgctcgtgccgctcaaggcgtaccctttcttcctggcccagctcaccaccttcgggtaagtaatccaaaccgtgccctctacttcctctgctgttccaggcggccgcgggcttggtgttcgacgatatgtgaagaaaccatttttttccggtgcgcttgacgtgccagctagttttttttttgggatcctgaattgcggttcgtcgttgtttgcgcgtgcagatacgtcgccgtctacttctccatactctacgcgaggtgccgctcgggggtggtgactagagacatgctggcgctccccaagcaccggttcgtcgcgatcggtttgctggaggcacttggagtcgcttctggcatgtctgctggaggtagttttgttcacgctcactctgagatttggagtgattgatttttgcagattaagttgcgtttcttgctcgatcagaaaagaaggggcaaaatggtttggtttcatgcagttctaggttctaattcaattttgttcatgggctgttgtttatggaacttgcagctatgctaccagggcctgctattcctatactgtcccaggtatatatgccctttggttagtttctgttgcaatccgttatttaactctgttcagttatatatgatggttctttgatctgagttatttcaattattactgaattataaattttccatttgtgctgtagtttctgctgccaacttaggtaacagtatttctgtagtcaccctaagattttgggaggttttggttgatgcctacacttaccaatttcatttgattactagtgtttggacctgctatggttctacaattatatgagaacttagatattcctttgtatgtctgctgcagtcattcttggtgtggcagcttatattctctgccctgcttttagggaggacgtattcagccagacaaatcattggttgcttcctagtaatttctggcgtgattcttgcggttgcaaggtataccatttgaaacatctgctttacttttctggttcttgtggcacaacatatatgtttggagaaaaacgatgctacacatgcacctatacatcagtaacattttactagtttgctacagaagtattattgtgctattattgtactaagtcattactaccacattgccaaattttaattgattggtcatcacaagattttttacatttttagtggggcgaatgagggccagcttctttcagaagtcaagttaatttggccagcattgatgatcgcttcatcagcatttcaagctggtgcatctattctgaaggtatagccactttctttctctcatatcgttcatttttgctactggtatcagtacttaaatcaaatatgttaattgcgtattacaggaagctgttttcattgatggtgcaaaacgtcttaaggttgaggcatcttttctctgtggtgcttttatttgttcattggcacacatttatttatgaactcatgatttaatgttcataaattaaatatttttgtgcaggggaagcgaccggacatctttgtagtcaattcatttggatctggatttcaggtgattttagaaagagttgggctgttctattacatactttcttggttcatgcttgaccgcattatcatgtctttaagcctggatttaatattgtatacaatgtaatattttttcaggctctttttgtctttcttcttcttccatttctttctaatttgaggggaattaagtttgctgagcttcctgcttatttaaatggtggtgctgagtgcttcttaaatgttgcagaaagtccaattggtaatggttcttgcacagaattatagtttccaattactgtatatgtattattgttgttaaatatgtgcaattttgttagctgactagcaactcattaatgcttatgaattctaatctagagatttctctttggacttctgtggaaatctcaaggaactttcagtctaatgaactactgaactttctgacattctgattgtagaccccgctttctctttttctttgggttaacctttgtgtatgttgcccacttgctacttttcttacagattgtggaggagctccattcctgcctttgctgtttatagtggtgaatatggcattcaatatctcactcctcaatttggtgaagatgtcatctgcccttgtggcttcccttacagcaacatcagcaggtcctttattgtttttttcgccccttgattactcctcctgcattttcatcttctttcttgttatgccagtgagtagactgaatggaaggaatataaccataaggtactaatttatgctcgttttcaattttagtgccaatatcaatctatattctttcacttcctttgccctacattcctcatggcgcggaattaagtacgtctttcatcattggtgctgcggtattgctgatgggcctgattctgtataaccttccccaattgtcattgaaacaatcgaaggctgattgaaggtaaagtgacacactgccagatgacttaacagaaagtttactgattgatatgtttgtggtgaaattgatttccacactgaagtacttaactatacgaagcatgtgacacattcagatttgtattatgaatgttatcaaaatgaagtttttctatagcgcaagcagtatgtgtatgtagtagggacattttttatacttaccctatagtctgcaaatgttatctaaatgtgagttcaacgagcttggtgcttagaatgatgctttgagttctatgattacattgtgctatgaatcatgatctgtgttcaattacatttaggctatggatgatgctatccttcctagtttaactgcttaatcaaaacacattatgctcaatgtcaatggctgtttcactcatcataaatgcttttttgacgcctcttgtcctgggggatggggaataaaagttatcttttttaacatttagtagggctgcatgccaacaagcaccaaagggaaaggttttttttaatgatgtcaaataattgacttctcgtgactcatgtagcataaaatttgaccttgtttaactactccagcctgtaagcctttttgtttctcatgtaccaagtacgaagattcaattttgtagtcgtagatggcatcataaactatgttgcgcgccgtttaggtcatttgaattggaatgcctttgaagcatttttgagcagatggaattagcctttccattttcaggccacgacttcactagaactgaatggaactgccatttctagttctaacatatcaaaataggctgctcagataatatgattaattcaatccaatcctagagattctaaacgggccctcagagaacatacttaaaatgtttcatgcatttttcttgtctcgatgcttaaactagtatgagatgctttcagcaaataacctaagaaattcaattgcattttgtaagtaagaaacgtagaacctagctagcgagcgggtctagtgactttggtggttaattgacaatataactattaggactaacaaagtctactagcatacaaggtgcttagtcttgtggacgcaagagatgaacacttgagctaggctgcagtaaagatgaaggaatcaacacatcagaccttgtttagttccaaatttttttacaaaatggacaatgtagcactttcgtttgtatttgacaaatattgtctaattatggactaaccaggcttaaaagatttgtctcgtaaattataagtaaactgtgtaattagttatttcttctatctatatttaatacttcatacatgtgtcacaagatttgatatgacgagaaatctaaaaaattctgcaaaatttgttgggaactaaacaaggtccaaatgaagataacagaggagcattgaagaccctagaggaaaagcgagaaactcaaggcattatacaatagaagcccagacaaatgaacacgaagaaatactgctgtaactaagagtaactgtaactaagagtaagtttaataatacagaccacgtgctggctgtaagagcaagtttaataatacagcccacttgctggctttaaggtttcttgcaggcttctcccagcccacctatacaatagttagctattcactattaatacatggtccacttgtctctctcacaaagtttcttggttcctgtgcccaggctggctgtaagcttacagcccgcttctcctctctctcctcccttctctcctccacctcagtatctagccagcttacagcccactataatacttgctctaaggtttcttgcagcattctctcagcccacccatacaatagttagctattcactattaatatatggccccacttatctctctcacagagtttcttggtttctgtgtctaagttggctgtaagcttgcaacctgcttcttctctctcatccacctcgggatttagccagctttttataatacttgctctaagaaagccactagagaagtgacactgatgctctccggtgatgcactggagatcgcactagagttatgatgaggtgcagcaatttggctccagtcc

SEQ ID NO: 4873 - DNA, 5649 bp, Sorghum bicolor
tatatttaaataaaatgcttcttaggcaatatctaatatatttagataaatacattgaattataaatttataatcctaggccgtagcactatacaagcatagcgcatacacaaaacaaataagaaaaaaaaaggaaaatactatcatggttgttggtgtgttgcttactgtgatgacatctatgtttgctatctgttgtctataccgttacatagaataggactagaaggaagagttatctacgtctttggttgatttgtcttggaccttcaaatgtttattatgccaaatagaaaattatatgtactgattagctatatggtcttgagcctccaagctctatggcccctggcggtcgcactgcctgcctctcccttagagctggctctaagtggaccagctgatggactagacaaaaagctaaaaaatttctcgttagtataaggtatatatagatagatactatagtagacattttaatattcagaaatgatctcataaagcatgacgttctagccaattaaataggtactacctaggccaaccatcccatcaatccctccactctactcagcactcctttaaagtcgccaggagatgaatataaaaggaagagaaattgcagaggtgggtggtgctgcagtggtgtatagggcatgtgattggagcttgttgtcaattagaagcgtgagtctatcagctgaatctaccggtcattcagtaatatttttctctcacaataaatcagtcaacagtactttctgccatggcttatcagccaaacgaacaaggtggcacaacattgatctacgtgatgaatgctaggacgtccaacagagggattatatacatagatacgagatagttggagaaggataaaatttaaagttaccatttctttcgttaacttgttagatttattagtttagtaataagtaaattatactaaactccaggaggctaaattcctagtttatatgactttgtataactgaatattaaaattatggcaattgttatttatcagatgtctaaaatttctgtttcttccaggtgatgaaccacaactgttggattggaaacaaatgttccacaccagattatgcactattcatcttcctccttcaggagttcacttcttcccgcgctcaaggctacaacaatcgcctcggtcgtcacccaccgccccgccgcagccacggagctccaacgagaccctatcgtgcccacgacagcctcccattttacctctccctctcgctgccactttcttctccaactccggtgagaatggtcaccacgctcttgccccatgacatgattcggtcgcctctaccgccgctagggccctgaagccaccttccatgtccgcgggagttgagaaaaaaagaggaggagagaggccggagagggaacccgaaattggagaagaagctctcccgacgcggcgagagatgccaaagagggatgcatggcagcggcgcgggcgagggcactgtagcctaaaatatctgaggtgtctcctctctaggaaatgtgtaaaattattgaagaaaaaaataaagaggccaggttacgggaaatcatcgaatcgaaattaaaaaaaggtaaaaactgaaaaaaaaaagtagcagtagaaaatatgcgccggagaaaacctaggagtgtgaagttcccgagttggagggaggcaggggagcccagccaaagcccaaagccactgccgaccgcgaccacttgaaagcggcttgcgcgtgtgccgtccccggcggccccctccaaagccctccaatcttgtcgctttctacgcgccgtcgcctccccttctcccccaaaaccatccaccgtctccgccgtcccaatcgccttcaaaacccccggcaaaaccctccatttccgccgcatctccctcgctgtcccggcacaccgggtcggtcgggtgttgaggctcgctcgcggctcccctcttcctggggcctggctggaagggaagggggaggatgcaggccgcggccgggagcgtctcttgggtcaccgcgcagccgtccgtcctcggccgctgcggcggcgcgccgtccgcttcgctcaaggggagtgcttgcggcgtcggaggaggagggtgcaggatccggggccgggacgtcgccgtgccgcggtgctgcgcgcgcgcgcaggagaagcgcccgccgcgagtgcgcaaatccaaggaggagaggcgggagatggtggagtccttcatcaacgggtgcgttctttgcccatctctcctctccctcgtggatgcacatcttgcgtttggaatcatttgcacgtctgcctcaaccggtgtctcctaaaatctaaaatgctcatttttattttgtttccgcactccctcaagccccatttgtcccctaaaatctaaaatgttgatttggttttattctgtctatatgtgagtcccccatttgttttaaaaacaatcttagggggtgtttagttaaaaaaaaatgcaaaatgccaagtactttggaatgatggaatgcaaaatgtgaaatttttcagggtcatgtttagttccatccaaaatgcagaatttattgctctcatgaggacctcatgaggttcattttgcaaaatgatgaaccaaaacccaattttttttttttttggaataggagggaaactaaacacccccttatttggaattctgtgtgtagttgtcttataatttctgacatttatctaaaagctgtctcgacaagtggagtggctgcttttaatttgagatggttcatgatttttggttgcctgccggatgaatatcctgcaggcaagaaaaagcgactgaaaattgctaatccagttcacaatgtctttgctctgtttcagttaccgactttcaaatgaaggtaaattcccatcagttaaccttacccataaggaagttggagggtcatattatattgttcgtgaaatcgtgagggatatcatccaagagaatagagtccttggtcctggtggcttggatgctatggcgctgagttttgaagatcgtgatgattcttcagagtcatccatgaagcatgaattgggtcaagacaatatagagatcttagatacgtctggtagtgaagtcagtaagggttatgtacctgaaatatccagcactgatgaatcgattccattgcaagacaatgccatcagcactcagacactgctgggttcatcaaatatcttagaggctggtgttctgaatagtgtggtccaaaatgggagtgcggcagatgcaatattgatggaaacaaatcttgagaaacaagatgaagttccatctggaggatccattgagtttgacttgaatagttctgaagagcaagctcgtttgtttgctcaggtttctgattcagatgaagacattgtactaaacagtcaggcagatgcacaggatggaacagccagtagtgctaccgatggagttattcttcccttagagtcttctgctgtttatgaaagcaatgctgcacttttaagagatcatgagacattacctaatgataatcatgatggatcaactgatggtgccgtggatgatgcaaacctccttgcagcgatcaatggtgttcaagcaaagcaagcttctttacatgagcatgatgcatcaactggaagtgtgtcgattgacaatgctcagagctttgatagtcagtatagtactactgtatctactgatcctataaatggttctaaatcggaggctgaagttgcaaccaagacagttgaagcatctaaagtacacaggctgcaagatgagtttgagcaaccattggttgatgctagctgtgacgggcaagaaaactctgacagccctgtttctcatccagcattagatacaaaggttagccaagttttgtttctgtgaaaattgtgcaatataaattgtcttctcttctaaatagcatgctacctttttgcgcctcttattttttttgtactatgcttaactccaaacaacaaaaggggattaaataatatgcttgttggtgtcatatatacccacaactgatttggttgttattgtaactgttatgtggattgcaatccacactacgtggcacctacagtgtggggataggtgcagtctaatactacacggcatctatattatgctcttagggtcttttatttaggttgagctatttgtcacatgcagtcatgcatcacactttgttgagaactggattttttttcttacaccaaatcttttggaaactgtttagatcaatatagaagaatagaacattaaatgctacctttagattctagagtttgccagaatcaaaggaaatgcatcatacagttaggccttgtttacttccacccaaaaatctaaaatttttcaagattccccgtcacatcgaatctttagacgcaagcatggagtattaaatatagacgaaaataaagactaattgcacagtttggtcgaaattgatgagacgaatcttttgagcctagttagtccatggttggacaataattaccacaaacaaacgaaagtgctacagtgtcgcgaatttttttctttgaggaactaaacacggcgttactatgttttagtgcttggggtgtttagtttcatgtcccaatcccccactcacccaatcctggctcctcagtgacaaccggagtatgtattagatagcgttattcctgttttatttgttgcgagattgttttggttggggccaaattttgttgttagcaaactgggcactgtcaaaatacaaccttttctacctcttattgttatactttttatatgacaaggagctagcaaattgaagttttcaattatggtatggtcttcatttgtgggcaaaataacattgcctgtagatatgtatctgattcattctattctactgctttgcaggggctgttgcacacagaagatcagcacagtgttgtacagatagatgaaagtgaattcaagatctcaacacctgggatcacaaaggaagaggtccaggcagctgatttcaggcatgaacaaggaattaacaccagaacagcgatcagcaggcatgcactttgcctcctaactttgcgttgcatgcttaccgtttataatttccttcacacatcacaaaaggcagcagtatattaggtgagtcagtgtttccccttggttcttcctagcgctcataaatagtggggatagctatgagttacactctatagaggtattgttctaaccgttgcagtaatcagaacaaatttctagttgttagttccatggtcgtcttgagtgtgcctggcaagtggcaacatcatagtgcagcccattgtgtaacccttaatttagatagatgggctgcctaggatcacaaaagccaagttgtggttttggccataagtaacttatactaaataacatcaacatgctagatcgagcttagatagtttttcattttcagtaagaccagtaatacatgcacacaggaggtattctattcctgtctttatgaccaagcttgcacttcatacttgtgcttaggtggctgaaatcgcatttgccataccaaaaacctgttcaattgagcttgtgatagtcatctaatgttctggatattctgttcctctgcaggaaaactttgaaagctctgc

SEQ ID NO: 4874 - DNA, 6919 bp, Sorghum bicolor
ttaaattttaaccaaatctaaaaagattttaacatttatgatactgaataagaatcattagattaatcatagaatatattttaacagtatacgtgttatgagtcataaatgttaataatattttctataactttagttaaattttcaatccaaatctaaaactgcgtttctttttcacggaatttgtgtgaactgaagttgattgagtaatctttttaacaaaggtagtagtaataactattataatggtccccggcagaagatcccgaagcgtacgcatacggttggcatgactatacatgcgtgcgtgtagtcattgaggattgattgtggccgctgctggcccgctacagtccatgatcctcacactgaaaacgccgttcctactctcgtctccatggcagacaaccgactgacaacagcacaggggagcccaaaaaaggttcagataaacaagattatcgtgtgcaaaatgtgcttgaaatgactgagaaatggaccattggtttgtacttattaggattaggacctggacctatgcctacaagtgtcaagaagacgataaggtaaactacagtaacttggaccacaacatatatactacgtactcctacatacaaatggaaatgtaggaagttcgctgaaatctcacggtaaataatacgatttgttgttgagggcatccgaaatggagaccaaaatgcaaatggactactgaagcagttctggtgaaacttctttttttaattctaaataatatgtatatatattatcatttatatttgtaagataagaataatttgttgatgacaatattgagtggttgaaaatgcattgattcctccatggtccatatgtgatgacgactggagtaaacaaaacagtaaacagcaggagtgtgagtgagtgagggagggagtaacagaaagtcagaaaccaacaagcaccggctgacaagctttggtgccaaagcggacgaaaaggctctgccgccgccgctgttgcagttgcagatcacacgaccctttctgcatccagccgatccaccctctgtcctctctccctccctcccacgcacacagacagacggacacatcacacagctggagagcaggtgcttctctctctcacacacctcggacggacaacgccgccgttgccagtcaagaacgtcgcggcgcagcgccgcgaatcctgcctgataggtgaagaaggggtggcatccatcgttttcgctccagattcttgctgcggctcatctgcccccgcgccgtgctcctgctccaaccaccaaccgaacccagccgcccgagactccaagagaggtagtagtgctcctcctcttcctcgcagggcaggatccttgttcttgatttgcctgataggtgaagaagtagtttctctcggcgcagcgccgcttgtgcgatccgtatggtttctgaagcgaatttcttgggaaccgttttataaacaaggggggtaaaaagagccaccattttctctgaattctttctactgcacgcctgggattgtgtcttgttgggaatgctgcttctttggaatccaaaaacaacgcaaaaaaatgcgccgcttcctctcacaaacaagatcttcattttttttttcctcgactcgattgttttagcccatgtcctcatgattgagcttttcttcccctttgtggtttcttgttcttcctcaaagtccaactgtccaagccactagatggcggtggcattttggttggggacgaaattttgtccctggatttgtctgcgcttcgcttcttggtctctctcatcagtcccctgttttccgccatgattccatctctccactccaccaaccaaccccctgtactgtaccttcttcccaactgatgattgcattgacttgacttgtttgcagctgacatacgctctcatgtcctgtcctgcccggcggatcggttctcggttctgagctgaacgggcaactggagagaccgtgcagtcctgaacatgtttggtttctcgcggcgacggggaaaacttggaaggtgaatgttatgcacagttccttgatttcatcatgtgatgtttttcctcactttttttttgaaatttttggtacctgctgtctgatgatgacaaggggagcttgttgacgtgaaatttggttgctcgagtatcagagcatcatttgagttttggcagttaagttagtactttcacctgacttgattcatcagcaggtgctctagtacatgtcagacttcgagattttcttcagagaatttttttttttcctttcatttactatcaaacttctatggccacagtagtactgtggtaaaaattgattgggatacattgtaaattgatgaagtcatacggcttcgtgaagctcagttaacattgcattgcattcaactaaagtcacatgtcctggttacattttgatccaaatcagtcatattttcacatttgcttttactgctttataatttgccttgagttttttgcttttctttttcaggtcgaagggtgacccaagtgattctttgaacagctctaggagtcctgttggccccagtaaacacctcagcctgcccaatgtgagcctgtgactgaagaaattgcatctagtattgaccttgttgtattttggccacaactggatggttagctcttgggttttttttctttccaggtatatgatgcagttatgacatcagtgagtggcggtgcagatgatctttccaaccgctgctcgtccgatacctttgatcctgatggacgcactttcaatatttcagaaaattggactgtgctgtccacagaggggaataaacctactcctcgtttctatgtaagccattgaatgtaataactagaactaagttcatatatcttgaaaaagataggtacttacttaacacatattcaactttgattgaacagcatgcagcagccattgtaagtagcaagatggtagtgtttggtggtgattctggtcaacgcttattagatgacacaaaggtatcaggatcttctttttccttaagtgtgttgtttgcatgtatgaactctgcactgtgtgataccatattattatcaaataatcttatgacttcacttattatattaattagatactgaatttagagaagcttacttgggattctgcgcctcctaaagtttgcccatcaccaagcggacgttcaatgaagttgccagcctgcaaaggtcattgtctggtatagctcttgtgaatcagtgctgtcttatggttctcaaaacctgagttactgatatgatgattttttcaataagaaaaattactgttacacctttgtcagttagattgctacttgtccttggatgttttggtatgtgtttcgatgtgttttcttacttgaagctgattatgttatgtttttgtggaaaattgtatgctggacactatgtttaacttttttgcacctttgacatcatccgaaactcaaagtattataagtcgatgatctattattcgaagaagacaaggattgttctcaattatgactcttgtatgcactcctttattactggaaaaatatttatacatgtgtgatggtacaggttccatggggaaatagtgtcattcttgttgggggtaaaactgagcctgcttctgatcgtttatcaggtttgcagatgctacatgattctccaaaacatgtgcagattagatcatgtcttcctcaaccagataatgattaaccattccatttctggtgcagtatggactttcaatacagaaacggagctttggtcacttatagaagccaagggtgatatccctgtaagctatctgatattaaaagttatactttggcaaatattcataagttgactaaagatatcttctggtgctgagttaaggcagctcgaagtggccacaccgtgattagagctggtgctacattgatactttttggcggtgaggacacaaaaggaaagaaacggcatgacctgcacatgtttgatctaaagtcatcaacctggcttccattgaactataagtaagtcataattggtttttggatactacattttttctacttatctatggttgtcccgacttcttaacatttctcatatgtgcaactgatttttttagaaaaagttgaggttcaatttgatttgtgttcttctattactgattaaagctcaatgttttagaggcactggaccttctccaagatccaatcatgtcgctacactgtatgatgataagatccttctaatttttggaggccactcaaaatccaagacacttaatgacttgtattccttagattttgatacagtaagtttgtgagcatccttggttcagtatactgtatgtttcgcatttagcaggctacttattagtgttatcttcctgacagatggtatggtcaagagtgaagactcatggtcctcacccatcacctcgagctggttgcagcggaactctctgtggaactaagtggtacatagctggcggtgcaagcaagaaaaaacgtatgtctcaagctctcatttggaagatgacttggtggttttatttcttaattgagaatagatgtatttctaatgatgaccatctatcttcttttgcaatttctaacaagaaatcaaattctcaggacatgctgaaacctgggcttttgatgttctacaatctaagtggtctgtttgtgtagtaccccctagttcatcaattactacaaaaaaagtaagtaaactctttctgactctcttatttagttttgaacttttgatagtatctcgtactcactactttccattttacatcactcatctaattagccagaaaactaaaacaactactgatgcagggtttcagcatggttcctttctaccacagggacaagattgctcttattgcatttggagggaacaaaaaagagccatccaacaaggtgaagcagtaggtttctactaaagagcatattttttagtgactgttaaagaactggttgtcattttgatccaaaaaaaatagagtgtggcttctcatgatcttaaagctcttaaaacacaatttgtcatcattgtctggcacatttatgatgtaagatttcaactaaaaatggttttgaaatttgaagcttttcgtatcaacttggattgtatcattgaccatgtgaccttgtgcaggttgaagtattagtggtactgcaaaatgagcattcttttagttggcgttcagccccaccagaagtggaccgcgtgctgtatgagtattctccaagcaataaggagcttgctgatcatctcaacaaatgtgcccccttgtactctaacagttccatcgcaaggcatagtctcacttctgtgatagaacacccacctagaagggaacccctctctgagtcattgttgaagcagtccagtttgggcacttcactccatgggcagttggatcaagtagaagagtgcagcttaggtcagaaactgcagaaaccaatggatgatgacagatacgatgacgtcgatgactcttcttcatgtcaagatagaactgtgagtattgcacctacaagtcttattcttcatttattgaacagctacgagcaaatggacatattatttttctctgcataacagattgtttcttacagccaaaagggcatcggagcaaaaggacaggacctggtattcagaatgacatagcagaaaatatagtgactggaggatcaaatgtgagaaggatagctagatgctcttcagatgttagtcagagccacttatacaacacaaaaatagcagacttaatcagaagaaacaccacgctcgaagaccagctttcgaccgcgctggcaagcaaagaccagctagagaagagcttatcgtcggtcattcacagcagagaacagctggagaagatgcttgccaacaaagacaaggaggctgagatgctgaaagagaagatagcatgcttagagctggcgcaggaagagtcgaacagcctctcgaacacggtgcacgctgataatgtgcgccttgaacgtgaagtggcattcctgaaggccgtcacagatgaaacccagaaggcaaggaaacttgatgtttactaataatgtttggtgatcatgatgtgttctttactgagttcgttttcatcttgcaggagctgcattccactcgtagggttttagcaggagaacagtcacgcgcgttccagctccaggtactacatttgagacatatttgactcatacattgagaagttaaactgtgccacaaatgttttttgacacgcaactcgacaaattttacctaccagtagttcaccatggccttttccaggttgaagtgttccatctcaagcagaggctgcaaatactggaggggagatcaggaacacccaccaaacaacctctataggctgtagtggtcacatttctacatttttgcacagcaattgttgcaagtttgtaacaccgccatgtaaatgattccgtggtgaccgtttatgtgaccaacaggttttgacatgctaccatgttagatctgtaatttgtgggacatgataaaactataaatagctaacggattgaaccgtgctatatgtgtagatattgatctgtaatttgcggggacatggttatagttaactgaaaggtggcatctgttggaaatcaaagtcaagaaacagtatgtgaatatagactttgaatggtggccaaattaatggaggaggaggaggagatttcaaaagttcaaacactgtaaaagttttgtatcctttcaccatgaacctctataaaaggaggggtcactttaacttgtaactatcaaccagaaagtgaaaagcaaagtgaaatacaaatgcctctcattctcctcatctctctgtgtccacgagtgaaacattgtgagcaacg

SEQ ID NO: 4875 - DNA, 7526 bp, Sorghum bicolor
  misc_feature (6443)..(6542): n is a, c, g, or t
gtttgtttagtagcgatttatgctttgatagctagctttgtttgtttctttaccatgaaggtaaattgtactcgagatagtcgtgtttattgttgtcatccaagaacatgtaacctgtctttatcatgccatgagtatatcataatcatgcatatgcacttttacgtatagaatacgctccggaagaatcagatcctcagtgggtttcttccgagtttgtggatccttcgggtgttgttgaattgccgaacgtcccctccgaccaaggcaagccccggacattaaaccctatccttgtattttcataaagttatttatatcacttgagttaatatgatgcattaggtgaataggagttgagtgaatcctatttgctgcattatctaccttgatgattttcatattaaccttgatacctgttttatgaaaatacttagtatgcttagtcctgcttattagataagttttcaaatgagaaagtttgaagggttgttgtggaatacttttaaggtcagtaatgttcaacttgagaccggtcggtggacttgctttaagaatggagtcttaaagtagtgtctccaactgtgtcgattaaggaccgtaccgttgattggcctgttgtgattgagacctttgagtacagcccacatgcgctggtaagccttacctatagctattccgatacttgagaacggctaaccgcgtactgggagtggaaagatggcgagagtagcgtgtacccaccttacggatctgagatgaccgggaaacatctagattggctgtaggatggtggtgtactgtactctcgggtgacgctggacccgttcttgtatgggaggatctatagaaaaggttgacatatgcaagattaagttctacatatgtcgtgtggtactgaatccccagctgggtttaatcgattcgaatcgccgtgtttcctcggatatggagcctcaatcctcgtaccatcatcgtagtaataattgaatctttggtataagaaagagatgattggtttatgaaagtctgataatgatcttggctagttatcttgagttaaaacttgaaagtaggctttactcttagtaagcttttatgcaaaagaaatacttgatcttgttaaagctttaccttgaatccccatagcctgcatacttgagtcttcacctcttttatagtcggttaagtcttgttgagtacttttgtactcagggttttattaacccctgttgcaggtgaacctcttgagaatccttttgttggtcatggttactttactcttgtggaggagagttatgatgatgatgaaactgatgagtgactttgggcaagtaaaagttgttgtgtgaatctatggtttatgtaataataaagttccgaagcttttatgtattaaatacttatggtttgtaaactttgaacttaagtttcaatctatgttatgtagactctatcatagagtctaaagttatttattacctcgaacaatgtggacttagagtctaaataagatttggagtcttattttttctacctttttctttaataaatatgctgccacattagcaaaatactataaataatatataattaagtatcttgaactctgtgatagagtcttgcattgtgagtgccatgagtgcccttaaaacaagcacacaaccgatgagcattaacttgaatctgattcctcgttgatccgtccgtggctgcacgaatctcatcgtacgccgcttgaagtcgcctcccaagtacacatttcgcgggtcgccggttcgccgctgcgtcgagcgcttccccaccagatctagagccttctagaatcctccgtcccggcccacccgaggctccgccggatccagaacctcctagaacccctgcactgcgcggtgcgcgccctcctcggcttctcctcctcacctccatccggatctcgacacccctccctcggcggcggcaccagacctccggtcctgggcgcggcgccgggcggcgagatggcggtgagtgaacccctcatgtggatgataactcgtgtgctgccgcttggtttatcgacttgttatccgtgcttcttgcgttgcggctgcctcccaagctttagcagcacagagtcattactacttgccactgcccgttgcacatagcacatgtttgatgtttttcttacatctcgtcatcctgcggccatttttgtttatgcattccgttgttgtggacattttttgtcccatgattcatggtcgtggtaggctctgacagttcgatatactgatacgctgattattaggaccaccaggatatgtgatcatgaccattctctaacgtaatagtatgattttctgaactctgattgcgtggacttgtttccttaatcttgttattaggccgcaaaaggaccagtggccgtcggatccgctatccccagcagcattgcccccgaggagcctaaagtcgtcgcgccggaagaggagaacggggagatggctgatatccaggacaaggaagtcagcatggaagggctatgctccataggcgcctatgatcagtggacgccgctctctgtttctggccagctcccgaaaccacgctataaggtctgcttttggtgttcgtgaccgcctagtttcacttttgctcatttagtgacctgttgtcttcgatggttgcagcatggagctgcggtggttcagcagaagatgtatgtctttggtggaaatcacaatggccgttaccttggcgacattcaggtagcatggtcttgagccatctcgttttttctgtagtttgttcctctagatgtatttgttggcagctgcatatgtcggcgagagttctcacaaccatcttgaattgagatgttgtcctgagctagcgccttcaacgccatgggtcttaacattggaaatccttttctgatcaaaggttctggacttcaaaacgttttcatggtcaaagctggaagctaaatcacaagcaggaccatcagaatcagccggagaagttccattttctgcatgtgctggtcattcagtggtaatcaccaaaagctcttttcgctcgagtcttaggaaattggccaggtttatcccaattggttagcttataactgtatagtgtatttgcatatggctttaatatcttccagattcagtggggaaataagatcctatgtcttgcaggacatactagagaacctgcagaaagtctcagtggttaggctaatatttcactcatattttcctattcatttctcagtgtcttagttctcatttcttatgcgcatttatgacagtcaaggagtttgatccacaaacctgtacttggtctaccttgcgtacttatggaaggtcaccggtatgattttgtttgtctgtgttttatcgccagaaagcttctatagtatttatacagattagcttattacctgaagcttccttttgtttttcgttttttctcctcaaacctgtgatgatttttcctatttcctttagagctcacgtggtggtcagtcagtgactcttgttggagaaactctagttgtgtttggcggtgaaggtcatgggagatctcttctgaatgatctgcacattcttgatcttgagagcatgacttgggatgaatttgagaccacgtaagttctgtgaattaagtttagtttcaattggttgacttatattagaaatgtttgaggtaaaactgttagtgtggatgtgtttttatgcaccggtccctattggatagaattcttagccttcctctttatgttgaactggtttctttagttgcagctggtaatacatttggtcttaggacatggaatggaacttgtattcttcttgctctgctttgaggagcaagattaatatctgactgttttcaaattatgatgttgctctccagaggcactcccccttctccgaggtcagagcacgctgctgcttgctttgcagaaaggtatcttctgatatttggcgggggatctcattctacatgtttcagtgacctacacctccttgacactcagacagtgagtattcttgtctctaaagctggtatataattcttttaggagtccaaatgaatgacttggttgttacagatggaatggtcaagaccaaagcagcaaggtgttactccagaaccaagagcagggcatgcaggtgtaactattggagaatattggtttattactgggggtggaaatagtaggaaaggtaaggttaagatatccgacagtttagttacaccacaatttatgagttataagtcaaaaccaattttctatggtgtagacatcaggaatgtccttataaatataactgcctacttatctatctttgtcgtgccaatcattttcttctcttggggctggtctttgagtttgagttatatcattttactttctaaaaattaccatagaaataattcctgtttatgtgcgcccgatccactgcaggtgtctcggttacccttgtactcaacatgtctacttatgaatggtcagttctcactgatcttgaggcccatgcaccccctacaagtgaggtgagctcattgatattctgcatactctattcactcgaaaattttagtttttcaactgaggaaaaaacttacttgtggtttaatgttcaaattccaactcaatcaaggtcacgatttatggatttaagtatctcacaatggtgaagctcgtctggtctaataaactgccttttttataaacttatatagtcataattattcatctattgtactaatttgttatgtactcttgctattagcctgttactgatattcagaagcatatttatgacagggctcaagtttagtaatgtacacaattaatggagagaattttctggtgtcatttggaggatatagtgggcgttatagtaatcaggtatgcttttctatgagcactctagtgtttttcacatgcccttatattcagctgagcaattctgtttgtttaggcttatgctctcaaggcaagtctcaaaccaagtgtcccgtctcaacaaattgatgaagcagagtcaaatggttttgccccgttatctgtagcagaaaattctagcaggaaagtcatatttgaaattgaggaacttaaagatgtaaaggtaatgtttggatgcataaacacaatttctgttctttttcactcttaataattttgtgcacaaacacaaatgctggatggtttctctggtctgttcatcaaaacatatgcaactattttcgctatcagcctggcaatagggcagataacagcaaaaccttgggacaagtagctacggatgaacaaaaccaaatagaagacagacttaatcatgagcgcttgcagagtctccgcctgaagcaggaactagctgatgtggagaacagaaatgcagaacttactgaggcaagttatatctcacttaccaaattgtgcagaactgcagagaatgccaataatatttacttacagtgctactactaatgcctaagtgatgatgtacttacatgttgatctctttgaaaagtcaaatcatgaaaaaagaacttgtacacatacaagagaattgcaacacacgatacatcaggcaaccatcactttatgaggaagaaacacgcttttcagctcagtgatcaacttccatttctttgctcggctctcttttatgcaggaactccacttagttcgagataaactttctatcgagcaaactagggcttcccaactcgaggtaacttggaaggatctgagctcatgctctggcactttgattatttatcatctcaaaccttatgccatgctatgaatggttttagcgaacttagtttccttttggaatatatcttttcctgaacaaagttgttttatactccctctgatccatatttggttttctaggtacataatttttgctatgcacctagatatgcactatgtctagatacatatgtatctagaaaagccaaaatgacttacaatttggaatggagagtagaaatttagaaaagggaatatgttcagagcagggatagattaaatttgagaccaagtccaataacagcatatataatctctaataaacaaactcatttttcgctggtaatcattgtgttgtggtctttggctctttgccaccttgcttatattgccagtataccattctaaaaaagtagtaaccattatgccgcaatggttttctacaaaaagaaattaaaatttggctaatttcaacacattagtgaagtaacttgcacaatacattgtggtgagtactggttatcagttagcacccctttaacactgaagtgtacttatacaaaacaaactctggatggtgcagtttatttatgttgcctttcatttgctggtacttgattttgaactgcctttaaagaaaacttttggctaattgaaacaaattaaccaagtgacttgnnnnnnnnnnnnnnnnnnnnnnnnnnnnnnnnnnnnnnnnnnnnnnnnnnnnnnnnnnnnnnnnnnnnnnnnnnnnnnnnnnnnnnnnnnnnnnnnnnnncccccccccccccccccccccccctaactctgaatggttcagtttatacgtgttgtctttcatatgctggtactcgatattaaaataacaataacatcgctcccccactgcccaatggacagaatgaagtttcagagattcaacaacgactacagaagatggatatcctagaaaaggagtttgaatcacttcgcagtgaactggacagtactgtatccgaagaagcagcttcaagtggcaaccagctgcaccgcagtcgcagtcggggcttctggaggtggaatgggtgaatgaacgcctcaaggctcaagtaggagtattgaagagaatacacttccaaagagttgccattcttttaaattgtctttcacaaaattttgaaggaacatgatatatgaattcaggatgatactagttcggaagcatatacaggatctaaacaaactgcacctccatcaactgtgaaaagcatcttatataaagtaaaatgaatgtcacgagttcccgcatttcctgtgttagaacaatttcttatctgataatggcatcgaccatgatcaccatagccgattttttttccccttaaaaatccatgattgagaaagcgacgagatacacatgctggttcacaaatgaatgccagaaatagcccatcgtgtcatttaggaggagaaaatagttcttttaaagtggcagtagctctgccttagaattaagagagaaaaagagttcaaaaatagagggagctggagtttaaaaatagagataggagccaaaacacgtatgtagtgtttggtttaaagaatcaatccattctaaatgagatgatacatcataacaaaatccctcaaatttagtagaataactacaatctcatagtagtactaattattagcttatgagaaataagatagtgttgcatcaactcatttcatttcacaaaccaaacaaataaaattgagtaggagtaatagactaccttgt

SEQ ID NO: 4876 - DNA, 19116 bp, Sorghum bicolor
tgagacccacattgatctagttttcctatgtttagaattcctctgttccaaacacatttttggcaagttttcctttgtttttcattcctctgttttgctactacacatctatcatattcctatattttttcctttcctctgttttatattccaaacaggccctgaaatgatataaattgtaccgtagacaaagaaggaaccagaccaacaactcatggccccgatgccaaagcaacacatggagatagcatatttaatctcaccttcacttgaaaataattattgctacaatgatttcagtgaaggtaattaaaaatttattaacagatgttagggggcttggcctgtgctagcgccccctccccctccctaatcacaccactgtagagcggctccataaaaaatgaagtttttgaatcatccatttggatgctctcacaactcactttttagagagcagtgagaggagtgattcttagggagaatcagctctgcgagatctgtcaaatgccccctttttagggtatgtttgatagaactctactatcttatttctagttatggcttatttacttttttggtggagtgatttaaaatgattttggtggatgtggagagaatcgattttggagtaattttggtagaattgatgaacaatgagtaacatgtttttagctcccagatactagtgtaaatagagaaatgattcgtgtatctttcccacaataatctatatgttgttttgttgtttggttgataaggagtgatttcgagggagaattagtcccaaaaagctctaccaaaatagttgaaagccttaagttttaattatggtaattaagtgacaactagtgaactcatgtttttaaagttatgattgaactatagttcacataatagtgatgcgcaaggctaggaaaatgacagatgaaaatcaagcccggaggtaaaggtatatgcttggagtttttatttcacttgttaagatataatagagtacatggttacatttagaataaatagtcgtattgttaagagaggaattctaaagctaacatggttaactagtgtcattagatgatgattaacttctatatattatagacctagcaatgtggtgagatgcaagtgaaaatatttttgaaaatcctttaaaatgctaactttaggcttttttgttcaaaaaataatttggagttggcatgcttacatagagggagaaaagtgcgtctttgcaattgattcgtattctttgaaactctccgaatgagcatcagagtgctcacagtagtattctggaaagatgttctagagtttatcacttggctaagctgctaagcagcgatcagatatgctcgatgtgctcaccaaagctgttatcgaagaaaagatgggcattgttcactgtctaaaaaatcgctaggacagtgtgacgtccggtgctcaccagaacggaggcaccagggctttgctcggtgaaaaagaatcatcctcattcctctcaaccaaacatacaatggaactatatcatctataaaatcatggatgaaaccatcccatctaaacttatcttcaaatcaaacatatgttaaatcattatttgagaagttacttaaagtacttggtattcaaacacatgttaaatttatttttgacaaccgagaaatatagagaataactatacttatatataatatttatttattcgaactcaaatgagtcgactccatgacagttcacccccaagcggagggtccatcttgtcaggtattctcagtccgtaaccgtaactcctccgcacccgacccgtttagcgccttcgtcttcagcagactccccagctgctccccgtcgcctccgcatctcggggaccccccgcgcctcgcccgcgcatccggcgacctcccaggagctgtagcgcccgcatggggcactagtaccggcacggagcccatcacttcccgcctacgccgccgccgccgccgcttcggccggcggccatggcgaactacctcgcgcagttccagaccatcaagtccacctgcgaccgcatcgtcatcgccggtaccaacctgccgcctcccctctaaattggcaaaacctaattctagcccccaaggatctgaactgcgctgccgcgactcacacgtcgctgctggggcgcgatctgggtagcttggtccgcttgatctcgctgctgtgtgatccggaaggatctgaacgagcctagattcgtgcaggaatggtgttactgtgccttgcctttgtattgttgtgtagctgagcgtctgctggttgcatctaagtgcctatagtgatagtttcagacttgttaagcttttcttttcttttcttttctttgatttgatttgctttcactagtttcagattgcttaaggaatgaacagtgagagatctcgatttgccattttggtagctcagtcttcttcttgtatgacgagttacaatgttactactcagaaagtactcatgtaaattcgctagtaatatgctgttccatcacctcctttgcttcgggaacagaggctctgacagtagggaagagcatgcactcgccaaccttactgcgctgcaacctgtgtgcgtaggtagctagcatggatggactaataaccctctaggggtaaatttggatcgcaattgaagtagacttatgtactttttttatttctttgctgtcaatggaagtggtttcaagttttgtatatttgtacaaattccttctcacatgttgatttgcgtttttgtaacagtcgaagatgttagtgacttgtggctaaatgtcaaggaaagttttgaacaacgagtgccagtgaagaaggcctgtctcaacaacaaggcaaggaaccctgtttttgttgacaatctaccagctgagtttatacaaactactgattcaagactacggagtcgattcccacaagaacaatacttgttctggttccgggagccatatgcaactgttgttcttgttacttgtgaggtactccccacccacatcacccctttatcctatgtatgctaatcattttgattctttcaagcaacagtactcgtcaaatggaccatgtggatgactttgccattcatttatttatttatataaaaatgtgcaggatcttgatgaattcaagaccattcttaagcctcgcctcaaattaattgtgcaaaatgatgaacgagaatggttcattgtgtttgtgtcgaaggcccatcctagcaatgatcaagcaactaagatggcaaagaaagtatatgctaggctggaggctgatttcaacaccaaaaagagagagaggtatttgttatgacttcttcatgataatatttgtttggaaaaaatgcatgtgttcaaattttccagttgttccaacccagcttttcgtttgctgttattttgcagtcatgttttctttcatgagcttatttccacttttgaattctctatggcctcttgggtaaaacgttactacaaacaatgtgagtagtaacagtgtaaaaatttctcattttctgatatagatgctgcaagtttgatctccatggagcagacaaggaattctgggatgattttgactctaaaatggtggactgcatcagaaacactttggataggcgggttcagttttatgaagaggaaatacggaggttaagtgagcaacggttcactccaatatggaacttctgcaacttcttcattctgaaggtacaataatgcaaccacagtgatgtttgccagtcttaaccacttcttttttcagttgcactgttactctatttgacttcctttccttaatgatgttcaggaaagcttggcattcatgtttgagatgagtaatcttcatgaagattcactccgtgaatatgatgaacttgaactatgctattcagaatcaggtttatatctagttttatctgacaatgaccttgcttcaattttgagcttcgtagtagatttgcattaaaaaagaaatacttcctatctaccagggtttgagtataaggctatttcaagagtgatgaagttgtctttatgaacttaagtaacttcattcatgtattcacattattatattgccatgatcacacatttcttacatgcaccttaaaatttctgatttgtaatccccattgagttctattgggacttagacaaatttgacctgttacgttcaaaaacaaatttgacctggatgaggtttatgttaacactagcgatattgcactgaccttctgatcacttatattactttgatatccagtgtgctcataagtcattgggattgctacaactcatagacctgtgtatctatttgtgaaaaatttccttgttctttctggaggtagtttactgtttatttattaactattttttactcttctcatttgaaaactataatgtcattatcaatgactagtgactacgtctctttcttgccttagaatttctagttcaataactattacttacagttcttgtcaattattttttattgtttgtttagtataaatataaccttgttctcatcaatgcagtgaactctccagggaaacatcgtgaatttggtgggctagatactggggatgaccaggctgcactgctaaatccaggagccaaagcacttacccaaattgttcaggatgacgtattcagagaatttgagtttaggcaatacatatttgcttgccaggctaaggtttgtacatagttgattatgcatttgttgcaccttgcaagctagatatggtggaaaatgtcttacatctgtgtgtctgcaagcattctttctgttttgttgataatttgctacactgaaatggtttctgctttgttacactattacttactattttactacctccgtcgagaaaaaggatgcaattctagctcttatgtatactatgctaatatatttcatgatgaatctaatgccacttattttgtatcagaaatattaatactttttgtgtataaacttggtcaagctcaaaatggtttgacttggtactatgctcgaattgcattctttcctggatggagggagtaatatatgtttgcaagcttctcaacctattgtatcgttttctttcagttacaagtgggcagtctttagagctagtagaataaatatgaaagaactcatttctgtttctagatgatccattttcaagcttttcacttttcatgttaatgtcaaaaggtttgtcattatgctcagaagtatcgtgatatttgcaaatactccctccgtcctagtatataaggcgtaaccactttttgtccatgtcccataatataaggcgtgctctctcacaaacataaatgcagctgtgctctaacacaaacttaaacaagtgctgtgagagagaattaaatgcgttcttggtctttgaaccagaggtggttacgccttatataccactaggacagagggagtacaatgttatgctagactttattttgctttattgttcatattggtgattgccacgccaactgaaaaccatgtatcacctttaatccttttaccatttattttcatttcaccttttatgcagctattgtttaaactgtctcgcccaattgaggttgctgccagaggatatgcttttgttgttggcttttccaagacactagccttgcacgaagtatgtaactactgtttcattcctttatgagttatttatatgctgggaagactattgtcatggaagtgctttatttaattctgattatgcttaccctttctcattcagaatgctctaccattttgcttccgtgaagtatgggtgataactgcatgcttgggtttgataaagtctacgagttcgcattatggtgatggatctgttgctattgactcagagaaagagttctatcgtcttcagggtgatctttattccctctgtcgtgttaaggcaagttgttgtacttgtgttatgccactgtccactccattgtctggtgtatctttaatctgaattctgcttttatgctttcctcgctgtagttcagtagctctaacaaaacttgaaatattgcttagtagttcttttttttttcctggaaggctggtcttgtgcagttagtctctccacttgtggtggaggtcttggttcgaaagagcctccttgcaaaattaagcaagggtaaggctgtctagaaattgctttcccagacccacctctaatgtgggagcttttggcctcctttttaatagcttggttttggggctttaaggaatgagtttttagtcattcaggctttaaggaatgttttcaagattcctgtacttaacatagcttggtagctgtggcatagaaaattcagaatgtagatgaagtgtaataataaatcaaatgtaaggcctccagggccaataaccaatggctctacttcaaaagagtgtttaatatttcaattaaattaatataaaatctaagctgccaatctaatatttcaagattatttttatctatgcaaattctcaaacactacaattcacacttgttacatgcagcataccttgacgggtggtttgtttaaacaataaaagaaatctgaattgccaattatttagtatctgcctagcaccatggttattatttacacaaacagaagctataacttggatgctttacgtgcaatcacaaattcacaatgaatcatttattttcttggtaatcactctggtttatttagagcatcaccaagagtttccaaaacccactcccaatcttaatttttggcaagattaaaaaacgctgtccaacaactccttataactcctaatcttttcgcacttggaaaaatcgatccaatcatgcggaaatacacacacgtgtatcaatcggccaatctggaggtggaatgacatgggttagaatctgggattcctgatgcaaaaattgccttctattttttaggagcgagattttggaaacgatttgagcaacccaacaaatatacttccaacttattttagctacttggaaaactcattgatttaccaattgtttctttaggaactattggagatcccttatatccttttcaggaattattttgcactactgtcttatattggctccaattacattggttaaaccattattatatggtcctgagttactaatggatgaccgtgttaccattactcatataccattgtggcttttaaattcaggatagaaattggtgaatgctgtcccattgtattttaattgtagtttattaacttcttcataccccagagttcaagtttgccatcatgatctattacttgtcttctggattatgttcccagaatttggaactgtttgtttatatgtcactcttcatgaatatcgcagtttatgaggcttgcttacttgattggttatggggttgagatagaaaagagtccagtcaacaggtacaagatcaatgctactattttatttactgacttcaccttttccatcagctagttaaattaatagatagattgcatttctgtcctttgtaagtcataatgaagcttgcagatgcaacattttagttactcaataccatcttgcattcaaactgagacttttaatgtgcttccagtgcatctttaagcatgttaccatggccaaagccagctacatggccttcaatccctcctgattcatcagcagaaataatggaaaaggagaaggtaagtattttttccagctttgcttcattgcttataattacattctgtgtggatagttcttacaccaaagtcacatttccctattgttcagtctacactctaacttgcccatatcctcccaactgataacattaacctattggaaattggtctgtctctttaatttggtatgctcaaaaaaatgaatctacaaaaaagtgctgccaatggactatggattatggaatatagaaactgactatgctaaattgatgttacatgttttcatggttccattacagcttctctagcatgtagggtgtggccccctcactgtcagcaaaaatgctcttccacacgtgaaatcttctggtacatcacaaatcacaaatggtaaaaatataactaaacatttgatggaaaataggataataatagatctgataatgtatccaggagacaagtattggtgatgacctttcaagggcgttctcgcccagcgacggcggccctcggctacgcagttcgtagccttggtccgtgataactggcggggttatgccccctcgcctaacctcgctggtcgggttatagccccctggccggcggcttgagagatgagagaggagagataggtttaactttgcttgattccaaaaggtctccaattacaaggctttatagcctggactcccaacaagaaaggaaactaatcttctagacttaaggaaaccagataatatctttctaaacaaaccatatcttaccaaacctaaactctccttttctggccaatccgcctggctagccactaacggcgccagcccccctggccaggctctgggcgcgctcagcggccctgcgcacatcgcgcagcccgcgacgcctagtgtacgtatttccccacatgacatctctcccctcctcgagaggcagctcgtcctcgagctggaactgcgggtacgaagcacggaagacgtcaacatcttcccaggtagctgaagccggcgaggaccccttccacttgataaggacttggcgcacaccacgagccaagcgtgacttgaccacctgctcaggttcgggcaccactgcaccatggcggagtggaggaaggggcggcggggctgctggaggctcgccgtggtacttcttaagaaggcccacgtggaacacatcgtggaggcgggcttggggcggcaagtcgagacggaccgcgacgtcgttgatgagctccgccacccggtatggcccgtagaacttgggcttcagcttgcccgcaggagccgcagacagggacgcaaccggccgctgtcgaaggcgaagaagcgcccagtctcccaccagataagagaccggccgatgaccccggtcgtagtgacgtttctcgaccgcctgggcctgctcgagccggtgcttgacgtcggcgatgaactcggcgcgttcctccatggtctgagccaccgcagcgacccttgtttcgcccggttcgtaggagcgaatggatggagggtcccggccgtacacgacacggaacggagtgtcgtggagcgaagactggaacgcggtgttgaagacgtactccgcccacggaagccaacgcagccagtcacgaggtctgtctcctgtcaggcaacgtaaatacatgatgataactttgttagctgattcggactgcccgtccgtctggggttgaaaggctgtcgacatctggagcttggtgccgctaaggcgcatcaactcgcgccaaaaatttgaggtgaacaccgtgtcgcggtcggacacgatggactgcggaatgccgtgcagccgaacaacgtccgcgaagaatgcttgggccaccccctccgcagagtacggatgcgccaaggggatgaagtggcaatacttgctgaatctgtcgacgacggtgaggatgacagacttgcccttaacgcgtggaagggcctcgacgaaatccatggcgatgtcggaccacacgccctgcggcacgggcagtggtaggaggagccccgccgggtggagatgctctgatttgtggcgctggcagatggagcagccacgcacaaagtcctgcaccaccgtcttcatgtgagggaagtgaaaatcgcgacggagccggtgcagcgtacgctgtaccccctcatggccctcctcgtggacgacgctcagagcctcctgcagcaagggggaggctggtggaaggtacagccgcccgctgtacgtgaccagcccgtcggacagcgcccagggaagcgcccgtgtgcccgcactgatctgctggagcgcgacgagggctgggtcagttgcgtgagcctggcgcagcctctgcacgaagtcgaagcggggcgcggacagcaccagaaccgcgctctcctcgaccgtatcccgccgcgagagagcatcagccactgcgttcgagtgccccggcttgtattccactacgaagtcgaagcccagaagcttgccaacccagtgatgctgaggaatggttgacaagcgctgatccagcaggtacttgaggctgtagtggtcggtcttgacagtgaaacggcgtccccataaatacggtctccaatggcgaacggcgtgaacaagaccgatgagctcgcgttcataggcggcgagagctcggtgtcgtggcgccacggggcggctgaagaaggcgatggggtggccctcctggaccagcaccgccccgaagccatgcgacgatgcatcgcactcgacggtgaactgcttggagaagtccggcatggcgagcaccggcgccgaggtcaccgcgtccttgagggcgtcgaacgcagcagcggtctcggcggtccacgagaagccgtcctttttcagaagggcggtgagaggtgctgcgatggtcccataattgtgaacgaacttgcggtagtagccggcgagtcccaggaacccacgcactgcccgggcggaccttggctgcggccagtccttcacggcctggagcttggcggggtccatggcgacgccggcagcagagacgacgtggccgaggtacgcgaccgacgctgcagcgaatgcgcacttggagcgcttgaggaagagcttgtgacgttgcagctcgtcgaagaccgcgcgaagatggcgtaggtgatcagcccaagtgctgctgtaaatcaaaatatcgtcaaagaacactagcacaaaacgacggaggaacgggcgaagaacatcattcatcaaagcctggaacgtggccggagcattgcacagtccaaaggccatgaccaggaactcatataggccatcgtgcgtgcggaacgccgtcttgtggatgtccgccggccgcatgcggacttgatgataccccgagcggaggtcgagcttggtgaagtagcaggccccgtggagctcatccaagagctcgtcgaccaccggtatggggaacgcgtctttgatggtgagcgcgttgagcgctctgtagtcgacgcagaagcgccacgacccgtccggcttcttgacgaggaggaccggggacgagaacgcggagtcgctgcgccgtacgatgccttgctccatcatggcggcgcactgccgctcgagttcatctttgtgcgcagcggggtagcggtagggccggacagccaccggcaacgcaccgggcttgaggacgatgctgtggtcgcgggttcgctgaggaggcagaccagctggctccgcgaagaggctcccaaagacgagaagcagctcgtccaggagggtcgtcggtgctgaaacggcggcgctgagggccggcgtgggtgtggccacgtcggaccagcacacgcgcctgtcctggcgggtaaaggacagggtgcccgcggtgaagtcccactcaatccggcccagggtcaccaaccattgggtgcccaggaccagatcatagccggcgaggggcagaacgtagagttcgacgcagaagccctcgccgttgatgacgagcggcgcctgtcgcagcacgccggggcacgcgatgcgttcgccattggcgacggtggcggtgaggcgcgggtcggcgaggatggggaggccggtgcgagtcgcagcagtctccgcgatgaaattgtgggtagagcccgtgtcgaggagcgcagtgagggtgacgtcgcccacggtcactcgtacctgcatagtatcacagatgggcatacccgtgacggcgcggagggagaacactggtgcagctagctcggcatcgtcgggggcggcctcctcgtccgcgagctcgatcccgtcaatgaagaagatgcggcggcagacccggttgtgacccctggaatacggctcgttgcaattgtagcaaaggccgaggcgtcggcgttcagcctgttcctcggtcgacagccgcttgacctggttgggcgcgcccctgggtggtggagctgggagcgctggcagagccggcgccggggccgggagcgccaggggtgctggagccggcctgaccgccggccgaggtgctggaccagccagcagtgcgcgtggggctggtggtggaagcgcggcctgggcgcggtccaactccatcagctcgacctggcgcgccagactcatcgcggcggcgagggtctccgggttgtggatgcgaactgtgtctcaggggcagaagaagtccccctgtgtagagctgaacgcgttgggtctcctccaatcgcccagcacgcggcagcagggcctgaaaacgattagagtattcgtcgacagtacccgtgcggcgacactccgcgagctcaaagagcggagccgacctcaggggcggcccaaaccgcaagtggaggaggtccttgaatcggccccaggaaggagtgccctcgccctcttgcaactggatgaaccagagctgggcgacatcttcgaggttgtacgacgccatccagacgcgctcctctgccaaggtgcgctgctgccgaaagtacgactcgcacttgttggtgaagagtagagggtcggacttgccgtcgaagcgcgggaaatcgagcttctggaacttggggggacggtccaagtcgcgctgtccgccgcccgcgctctcggacgtagaagccgacttctccttcagcgccagcatgtcagccttcatggaggatatctcctccttgaaggatttcagcatctcgacgacatcggcgattgtgggatcagccatggtgggcaggggatgggtggacgcagtggaggatgtaggagacggcggcggggtagggtgggcggcggcagtggtggcctgggaggttgacgaggatcggcgtgaccgtgataccaggttgtcaagggcgttctcgcccagcgacggcggccctcggctacgcagttcgtagccttggtccgtgataactggcggggttatgccccctcgcctaacctcgctggtcgggttatacccccctggccggcggcttgagagatgagagaggagagataggtttaactttgcttgattccaaaaggtctccaattacaaggctttatagcctggactcccaacaagaaaggaaactaatcttctagacttaaggaaaccagataatatctttctaaacaaaccatatcttaccaaacctaaactctcattttctggccaatccgcctggctagccactaacggcgccagcccccctggccaggctctgggcgcgctcagcggccctgcgcacatcgcgcagcctgcgacgcctagtgtacgtatttccccacatgacatgaccattgagcaataatacaaagctggtgttgatagtttctatatttaatgaaagatgggatgcagcagatttaataatttaggccttgtttagttcaccctgaaaaccaaaaagttttcaagattttccgtcacatcgaatcttgtggcacatgcatgaaacattaaatatagacgaaaacaaaaactaattacacagtttagctgtaaatcacgagacaaatcttttgatcttagttagtccacgattggataatatttgtcacaaacaaacgaaagtgctacagtaccgaaaacttttcacttttcagaactaaacaaggccttaatgctaaacactggaatcttatagtgtgaggtcctatacagcttcatatttgctaatatgttctttgttatacaaaatccatttccgccacacttattgcaactgtaaagttgtggatccttttcattcgcagatggttcttcaagtcaaatcaagagaaaagctcttcagcattcacaggaaacctctgccattagaaccttctttacttctacgtgaggctaataggcgcagggcttttctctctgttggaaatctatccgagctgtatgattcatctgatgcgtaaggactatgcattaatctttacagtataagattttagattgcaatttctatttacttacatacttgtgtatgtttgtctgggcagttcaggtttagatgcaaattcaaaacttcctcccaacagacctgcttctaacttaatgacaagaacaatgtcaggtccagcaacgtccgagacttcactgccagttgatcgtcccatgaggttgtcagaaattcatgttgcagctgagcatgcactgaaacaaacgatatcagatcctgattttatgacatcactttcatcactagaagaatttgaggtagtgtatcatgttcatcacaatagatacacattatgaactttaagtttcctaataatgcttctgtgttttccttgaactaattttttctcgaacaacgcaggagagctgcatgtcatttcattaagaagttttccttgaactaattgatctagagacaaatttgaataaagatgaactgtaacagtaactattttttgtgttacagaaaagatatatggagcttactaaaggtgctgctgacaattaccaccgctcttggtggaaaagacatggagttgttcttgatggagagattgcagctctgttctttaagcatggaaattatgacctagctgtgaaatcctatgagaaagtttgtgctctctattctgcagagggctgggaagagctgttggcagatgttcttcctgatcttgcagaatgccagaagattcttaatgatgaagctggttatttgtcttcttgtgtaaagttactttctctggacagtggcttgttttcatctaaagagcggcaagctttccagtcagaagttgttcgacttgctcacagtgaaatgaaacatcttgtgccccttgatgtctcatcactaattacatttgctggaaatgctggtccaccactagaattatgtgatggagatcctggtacactatctgtagcagtttggagtggcttcccagatgacatcacactggagtctctcagtttaagattgtcagcttcttctagtgcagatgaaggtatcaaggtacaagtactgcattgctgattgctacccttttcctctgtggcatgtcctattctgttatttgtggtttggatgcactactatgttttcaagtaaaattcagtttcatccatgcagaacagatttcataaaccaaaactattatgataaagtacattcaaactctagagaaatgaccgtacacaatctattcttcagtcacctaatggtttaatgttgccatccatgcaggcaattaaaagttcagattctcatgttctcgtaccaggtagaaatatcatctcttttaacattcctcctcaaaagcctggctcctatgtgttgggtgctctcactggacagattggcaaactgtcattcagatcgcatggattttctcaagatggtccagttgaaactgatgaatttatgagctttgagaagccaacaagacctgttttgaaggtaattgctaaaatgagctgaagacctgaactgttttataaaatcgtagtcccatgtcagtaatctgccaataagagatactagctatactttcaaaacaaaagcagggcatagtttcttgtaattagtgaacatggttacttttattgttttgtttaagacagctatgttatcattgctttgtctctctgttgtaggtgagaaaaccaagggctttagttgatattacacctgctgtgtcctctgcattgcttatgaatgagctccaatggattggattaattgttaagccaatagactattctttaaaaggtggcatattgcatatcgatgctggtgctgaactgaaaattgaggagtctcagatgattgaaatagaaatttacggaagtgatgtggagtgtgctaattctgccaacggctccattgaagctggaaaggttgaaaagatccctattgaaaatggaaagataaaacttccagattgggctagtgatgtgactactcttgtttggtttcctgttcgtgctattgatgatacaattgccagaggcgaatccccaggtctttatgtaacaagtgataaattcactatgttatgtttcaatcagttagttgacctttctttgtctccttgtttcagtgtctcagaaacagagcgttgtagatgggatgagaatgattgctctcaagcttgagtttggagttttccataatcaagtgtttgaaaggtatctctctatttgtatcctcgaacatgcagaagagctgtgtgtcatgtctgtcattgtatgagaaaagatgagatacctttcaattcggcgatcctttagatacagatattcaacaagtttactattgtgattttcaggaccattgcagtccattttactaacccattccatgtaagcacacgcgttgtggacaagtgcaatgatggagctctacttctacaggtagagttctctcctgtctggcacatgtgcatgagagtcattgcttatgtgtggcaattgttgcactacaagatttgaaatctaataattctaaaaaaaaggaaatccaaacatttgttttaaaaaaaaaatactattggctccccaagcaaagaaaaaaaagagtttctgcctctgccactggttctgtgtaaggcataagttaccatgaatcatgcaattttagcctatttgggtgcttctcatgcccatgggtccatgtgtttgaccagacaatggcaacactaaatcgttgacttgcaaatccatgcaaatatgtgtccgtacacttgtactttagtttgaagcatgcaagtaacagtctttgttggctctaaaaaaagtatataaacttgatctttgcatgcacaattaggtgacttctacaacttgaacaattttcaccttttaggtgctaaaaagatattttttcctatcaaaatattatgcatgtttgaacatgttctgaatcataagttggtttctcatatatgtgaattctattatatgtgttgctgaccttgttgtcaaagtgatatgttctgcattttgttaagcagcagcattagcaaaaattctggcaatgataattgtgtatttctgcaatttgaaattataataattaatagttttttctggtcatgtttagtctcaattagtatttttccacccatttcaggtgatattgtgttctgaagtgaaggccacactgcatgtaaaggatgtacggttagatcttcaatctggatttgagcacttgggcaaaggagatggacggccagctttgagtttattccctctggttattgctccttcttccaaagctggaattttattcatgatacggttaagtggtacaaagggtaagtctgtcatatagtctgccttttattttagctgtctcttacgattgtttgccgtcgctacaatcctcttagtactgcctactgacttatggatttcatggtatattttagatgcagatgaggcagaaaatgcagacagcatgctgaatatcacttatgggatatctggtgacagaacaactggagcacattctcctgtacctgtcaaatctggtgactctgaagagcttctgttcaagattgcacttagactgaagcgacctgtcctggatccatgtctagcagttggattccttccattttctactgactgcctgagggttgggcaattagttaatatgaggtggagggtcgaaaggctgaaaaccccggaggatgcatccatatctgtcgtaagtccagaacattcttgctcaacatttgcaactcttgtactaccagtcctgtaaggtcaattatcctgtcggcactcagcggtgtgccttagtgtttaaccgtttatgcagtcaataagtaagcttataaaggacaaaaaccatgggaagttttctttacaactaaactaggactttgtgttgcaggacgaactactttatcaggttgaggcaaacccgcagaactggatggttgctgggaggaaatgtggtcacgtatcgttgtcaaatgagcaaggtaagaaccgtggtaccagatgtttcaatccatgtgtggcagagaatgatgacttccaatccaatttgaaacgaaaagactgacagttttcacatcacactgtacttgctcataggttcaaggatggagatcatggtgacatgtgtgccgctggtgtctgggtacgtccacccaccgcagctgggcctgccggaggtgggcgaggcaaatattagctgcaacccagcagggcctcacctggtgtgcgtccttcctccagccctcagcacctcctactgtatacctgcggcatgattcttcctgggcagtcggtttgctgccatttacacatagatgagctgtagagtctgtttttggcgagactgtgtttttgtgtagacatggtttcaccggaatgtgtttcttgtaattctgttgtgccatgatcagtgtgcagttgtacattgactggtacatgaaactgcttccccagtattccgtgaaactgcaagccagatttgttcttcagattgtgttgttacagacagattaccttttgtatatcatccggactcaaatgatacttgtgcttagacaaatccacttccaagatgatccttattaggtcatttacatatctataatgatataatgattcttgttagatcatttacgttgatctacaaagcttacataattgacagcatccaagattcaaatgaaaggttacagttaagtcaaaatggttcgtgcccaatatcgtccagcccaggcctgtcataagatcatctccaacagcatcgaaaatttggttgttgctattaaggccctttttggtacagctcatgagcttttttatttttgccaaacacttatttctaaaataggtgaagctgtttttctcctctcacaaagacatgagttgggatgaaactgaaaaaaaatagcttattacagctctttttttcatttctctctcatctatacatgaagcagttggtaaaactattttaccaaacacttttttcaaaacagttcagcttcatctagaaagttgctcataaaactatttatttaaaaaaatagctataccaaa

SEQ ID NO: 4877 - DNA, 8953 bp, Sorghum bicolor
aggaaggagccagtcgagccgtcgaggtgaatgacccgcccagtggagccctgccgcggctgcgtcgccgccggatctacgtgctccctcgactcgcgctcgcacgccgccgcggctgccctcgcctttcctctctcacgccgccgtagctgtgcatggatggccgcgcacaagtcaggcgattggaagtttggaaccctacaacgagttctctgttttaattaaaaaaagattttcatctagtacttcaattattacttaattttttttattatgcatttacccttttacccttcaaaaacaaagaaatacaaaaaaaggaattaccattcctttatttggggtcctaatccccctcaatttcgaagacgatggaaggtgacgtgacgcatatggcccaccgaccatagacacatctatcgcctcctatcaccttactgtcatcgtctttcatcgcttcccatgttctggacccatcgaccatagacatataattcgcttctcatcgcctctccaaccattgtaaaaatattctaaaaactataggaactcaatcctctacttgtcttgtgtttcttccgtgaataaaatggagcctaaaagcaggaaagcacaagttagtaggttttaaagttttagggcacttagacattttgttggaacaagcccctttattctctcaacccaagcatactctttcacttttacctagcagttcaaaaaatgtcttaaaaaaaagtggtatcatctcgtactccaatgtatattttcatgtgctgcattaaggccttgttcagttcatgaaaattttttgttttggctaccgtatcattttcgtttgtgtttgacaaattttatctaattatgaactaattagacttaaaaaatttatctcgtaaattacaggtaaactatacaattagattttgtttttatctatatttaatgctttatgtatacgttcaaagattcgatgtgattgaagaatcttaaaaaatttggaaaattttgggaaatgaacaaggccagcttttttgttactcagattgtgtaccggtaataataaggggcgacgtcaccggtcgggcagttgcgctcatctagcacggcgaatttaacaccaagctggctggttaattcaatcattatattaaatatatctatttactagtgcactcctagcctgtagcttgccccgtgttttattagcaagaaaaaagtgaaacaaaaaaaaatgaaaatgaagaagaaggaagctctatgcaaaataggtttctcatgggtcacacgtatgtctagtttgattttttttttgacaagatgtggattttgatttgatacgtctctttctttatgtagcgtcaaattactagattcaatggctcaacttcaacaagcgcctgagaaagcgagggctgttgttgtctgtttcctcgtgaaatcacacacgtccccatctttcaattcccaaataaacacgtcaactgtttggacaaaatttaggacgcgtgtgaataattgtgaatcacactatagtatatgcgcttgtcttataaactgtactttttatatcaacaacagtgtttttttcataaataaatcagcaaattatatttttagtcatggtttttcagaccagtgaactgtgaacatactagatctaataaactgggtccaccttcatgttaaatcaagtttggctttcagatttttttttttaaaaaaaagtttggctttcctgctcacgtttctaaactggccccgtaagcttttttttttcagcatgaaacaatcaaggccgcaagagctccaaatcccaggcccatgtccaacaggtccatgtctagttagacccagagcccacccagctaatcggtccaaaccttaggcccatatccaaacggcttgctgcgaaaaatccgggccgctagcagacaaatacagttggctggcacacggggcgagccgcgagcgagcgtctgcgctcgggagaccgcttgctgctacacttcttcttctttcttcttcttcttctccttcccagcagaagcgaaagctcccccctttccaatcccacttccacaccccccttcttctccggcctccctcccgcgcgcggccatgtcttcgccggcgccggcggaagaggacggccgtgcgccgaccaagtacgtgctgatcacgggcggcgtcgtcagcggcctcggcaagggcgtcaccgccagcagcatcggcgtcgtcctcaaggcctgtgggctccgcgtcacctgcatcaagatcggtacgcgctccgcgggcttttgcgaggtgttcccctcctggtgactcttagaaccctagagccgccgttttgggcgggggtggtcggcgcgagataggagtgtgttgttattattggagtgatgaatgcgacccgcttccgtgattctgccagggtttaatcttaatcttttccggattaggtgattgggtggcaaaagcgggagtttgttgggttctgcttggactccccgtggtcaatacccaatcgcaattctttactacggcttggtggaatttggggggcaatgagtactagtagtagtagtcaaagattaccttcttggggttccagttacttgtcaccttggcttggcttctagtgaaatgaaaattgatggtgcatcatgaattgcagcccgtgcgtgctcttgatagcaggttttcaaggcttgttgttgtctcactagtaccagtccttttgttcagcttttttaggtaaacttttccttccactgtgaaggttggtgttgggccttttagtggtgtatcgtagccttcgattgtcgttttattggcatgctgcactgtacgtctgtacctatgctttttaaagaattgtgactaaagtggggcaccgttaggatctcgtgctatcacaaaaggctaaatcggagggttatttctttttctgtgtgattttacaacacaaatgttttgcttatggatgtggatgttaaatcgtttggaggggctttggtccagcattggtcttactactttggtctcttgtttttgtagatccatacttgaacacagatgctggtacaatgtccccctttgagcatggtgaggtgtttgttcttgatgatggtggagaggtaccgctccctaatacttgcatttaatacacattctttaaatttgcagtttcggtggtatctacctaacatgtggtatctgtaggttgatttggatttggggaattatgagcgtttcatagatgtaactctgacgagggataacaacattaccactggaaagatataccaggtgagtatcttctgcctcaaggaaatacttgtcttttctcatttgagattgtaataaacctatagtttctgcttctttcagtctgtcattgagaaggagagaaggggtgattatcttggaaagactgtacaggtatttcttctgtggcatttaatactccagttgcattgtatggactccccatatggcaaaatctgaaacacctgtggtttcaaatatccaggttgttcctcatgtcactgatgaaataaaacagtggatacagtccgtgtcttcagttcctgtggatgggcagactcgtccagctgatgtttgtgttattgaattgggaggcactgtaggtagggttttatgacatcttatgatctgacacttctgtaattattattgtagcagataaattgatttcgctcttatttcaggtgatattgagtcaatgccattcattgaagctttgcgccaattatccttttctcttggtatagctggtttttgcatttcaatttgcacattctatggttgctgtgatatgttttggtgttacagtttacactcttatgagacttgtattgtttctcacggtctattttttctatttctttgggaacagttgtacccatagattagggtaccctctctgcactgccatttcttgtatgctaatgtagtgttcacacattttacatttcttggaagtaaaagcatctttcttgttggtgactatcatgaatgtgactcatactcttatatgtgtgttctaggcaaggagaatttctgcctcatacacgttagccttgttccagtattgggtgtagttggtgagcaggtaaacaattcttcctttagcagcgatgatgaattcttcttactgcttcatctatcctgaaatgagggaaacaatcgcattacacacacttttcaagtcctgtatcacgacatagttgctgctactaggaatctgacattcttgtttccctctttttttggtagaaaactaaaccaacacaacacagtgtacgagaactgagagcgttgggtctgactcctgatcttctagcatgccggtcagcacaggtaatgcaaaaacataaaaaatgttaataactaatagcagattctttagaatatgccttatttcattcatcattatatagatttctgaaaatctttcccatgtactggataatttgtgacaaatctgctgttgaatttgttttttattttctgtaatgatttttgttccaagcagtcattagctcattttaatctgccgcttagtacatgtaccttttttttgttcatgtctcttgtccaatttgcatttaagctttcctttttcatctgagctatgtttatctgttctttcagccactaataggatctgttaaggagaagctgtcacaattttgccatgtcccggtatgtttcgtgattaaataaatctgaaaaaaaatgccatttatccacattgtttctcgactcacattctgtcttcattcctgtaggttgagaacatactcaacatccatgatgttccaaatttatggcatgtcccacttattcttagagtgagttgcaatgttcactaaaaccttagccttgaatatgtgcagaaatatattgagtccatatatggattgcatttagtgttgctgcagcacaaattttgacgagtactgttttgcagaaccaaaaggctcatgaagctataatcaaacaactgaaccttgctaggtgagtcaaaaaattactgaaaatcagtgcttatcaatgcatgtagagtatttggatggtctgcacatggaatgttttgtatacccaactacctagcacctaggtggctagacagttgtttttaagcagtgattcatatactgttgagaaactatatattaccagttttggcaaatgattggcttaaacttccatttttgtaactatgtttgaaatcatcctaattaatgttgattgaaaggcttactcagacttttttggtgtaattggttgaaatgattacattgtatttattgcaatggcatcccctgtttttatatattgtgttatggacttgtggttactatatcttatagcaatatcatcttggattttattttataggtccgctggaccacctgagttacgagattggacagatatggctgagtcgtatgataacctcaagaactctgttagtgttgtaatagtatttgattgtcgattcttttgttggtgcagaataagcctgaatgaatatcactattatgcaggttaaagttgctttggttgggaagtatactaatctgacagattcttacctatcagtggtgaaggtaggtacaaatgatccttacatatcagtggcaaagttaagtagcttgccaattgtgataatgtctgcaagcacaaagttttagttatattttatgtggtgcaagtaattattataattatagttattttcatggttcctagagtataaacaattgttctctaataattgttaaataactgaggctttgagctgtcacaatatgtttttactgtggatgcaatttgggttcatgtactatcatgcaaaatgttttttttctaattcatttttgcatgtcttaatttattccaggctctcctacatgccagtgttgcctgttcgttaaagccatctatccagtggattgcagcttcggatcttgaagatgcaactgcaatatctgtaagccactaaccatgtgttctaagattgaaaaaccgcagtaatagcactgcaatgtttaaatggttcatttttttgggatttgtgataagtatctcagcaccccatagcttttatatctttcgtagctcaagctttctgtatcaagatttttctactttcagtttcacatttgtagctacactcaatttcctcccattatgttgcctgtccgttctttgtatgtcttactgcatcccgtgatgacaattttttcaataggcaccagatgcccatgctgaagcctgggaaactcttaaagtgagtatgccaattgcatttctttactattttaaatatgcaaagtcaattttgaaagttaatattaattgtagggttcatcatgcattttgatacctggaggattcggggatcgtggaatctcagggatgatattggctgcaaaatatgctcgtgagaataaagttccatatcttggtatttgcttgggcatgcagatatcagtgattgagatgtccagacatgtgtgtttgcttccattttttcttttacttagaaactatccatatagattcttacttttattattgtgctttcctaggtcctgggcctgggagatgcagacagtgaagagtttaacaaggatacaccaaatcatattgttatgtacatgcctgaggtacttccttttctgttacgtttatggaagagacaagagtttgaaaagtttgatctaatgccttaacaatgaactgtttaggtttcaaaaacacatatgggaaacacaatgaggttgggctgcaggagaacattcttcaggaaacctgattgccttacatcaaaactgtatgggcatattgattctttcttgattaatatcatactattttctttggtactattgaatttagcttgtttggaaactcaatctattgccatccacactgataaatgtcttgtgtagttgtgttatctagagctttccttactaagtagtgaatatagttttgcctatcacagtcttaaacgtggcttctgtttagttgagatttggtaccaacccctggttattgatcatctttagcatttgccctgtataaaattatattgcatattctcacttggactactgattgaaacttttaggtatggaagtcctccacatgtagatgagcgtcatcgtcatagatacgaggttttgcatcaatatttgtttctaaatatcctattagtctttatgtgcattgtaattatatgcttggaacttattacttgtttctatttttatttattgtaggtcaatccctcttttgttcccatgcttgaaagtgctggtcttcattttgttggttgtgacgaaagtcgaaagcggatggaggtactaagcaaatagccttatgctattcttgggtcttgaatttctttttcaaaaacctgaacctgcctgcacctatgagcagattgtggagctacaagatcatccattctatgtaggtgttcagttccatccagagttcaaatcaaggccccgaagaccttcacctccttttacaggtgagaacctttttttattattgaaaaataacttgcaaaatcgaaataaaaacttgtgaaatacgtagatcccttacaactggtcctagtggaatttgcattacaacgcttctttggtgaactgtactagtgtctgagttctttttagtttttacctgcagtctaaaatttgttgtgcaagactgatattatttgttttggaactatgcaggtctaataatggcagccactaaacaactgggaacaatttcgaatagctcgaatggctatgttggagcttctggctaatgtaatgtcaggtaaagcgttatgaaacttcattattcttcaggcattttctctgtgtatgtaactaatgtttctggacatttggtttatgaatggtactattgtttcttttgcagatagggattcctctgggtgagaagcattttgctcgttgctgcagaaacccaagttgtttcttgtacacattattagatgtaccgggaataaatctgagccagaagaagagtttttttattctctctagagaccacctgagtggcgtcgctaatgatcttacagtgtatggggtcgaacgtcatgattttagtgattgttatgcgcttgtcctcccacccttgccattccaattgagctcaacagcagtcagtcctcccatccttgcgattccaattgggattaacagcagtctgtgattctgtgcaaggtaaaagtttgagagaagctcgagattgtctttggtcatgcaactttgaaaccagaaatcttgaccattgaactatcaacaccggacaaggttgactttgtattttctgatcaaaacagctttattttctaaaaataaaaatccataaccaatttgttttataataagaaaaaaaatgaaactagtaccagtatttattttcctgaagataatgtgtctattggtacacgattttgagctatttgtttgtttgcttattccagtgtttcattgctcgtagattggttggctagatatttaaattattattattattttgctaaattaaacgagattggccaagagaaatccattcctagtggagcataaaattgtaaagccagcacaatgccaccggatgatccgctaatgccatgttcaatttacaaaaccatatggaatttctcatggagttgtccttataaaatgtccccgagagaacatcatccttaggcatttttagcaaaattttaacagtttttttcttgtttctttttctcctaccagtctcgatgcacgtgataattctccttgaagctgctatgccttgagtatgcaggacagttaagcagacacggcgctgccactggtttgttgatatatttacaggtagtagactgaaa

SEQ ID NO: 4878 - DNA, 7374 bp, Sorghum bicolor
taaaacaaatattgtgcctctacattgtgtgacatagtgtgctcctcttgtaagcacaccttagtcagcccaagttgttgtggtttgtatgcttacactctacaaaaattgcgtgacactttttttttggcacatgaactaattttgaactaaaaatttgttgagttaattcgacatatctccgatttttttgacaatacgcagcaccagttctacaaaaccccactacaactttaaaaaaacgaatgtaggccctttcatcccaacagatggacccgcaactacttttaatgatcctctcaaaaaactaattttaatgaattttttagttcattgctatatgtgcctaaaggaatagatgttaatatttttcaatggtcatatgaaattgtacgccttctggtcttgggggtggtgagttggacgtgtttgaccttggttggcgctttgcctcccgttccagcaccgccatatttatcaggccagtctcagcgggggtttcatcaggatgtcatgcacatttattagagcgtcatgtcagtaaaactacactttttgcatgaaacgaagaggagagagaaggaagtagtttcaccatggtgaaaccccgcgggcgttgtttcccacgcggtgaaacgggatgaaatccccactgagggccaaatcgtttcaccatcttgcatgtgatccaatcattttgcagtaattaaatgctttgtttagccttggaaacaacaaagtgaaatgctttattgctggagttatttcatagatggttttatttcaatcttcatgacgtgttggtatgtgaaatcgtacagtgacactatcccttgagattggcctcatagcccatcgtttcatgcacccattcggctctcgttcactggctggccccatgcaaaagcaagcaaccagcgaaaaaatgtggtcactaggaacacctcattccactagccgtctgaactatggttgtttttcatatgaaatacactcgtaaccctatttaatagggacagacagagaaaaatactgggttatgaatgaagagagatatgataagagttctataaaagtagagagagttccatgaggatgaaacttttctgcactgtttctaaagtatagatatgttaaactgggttataaaactttcactgaggttgaccttagtgaaggatagtatggtattttctctatcattaatttatcactaacttgctcggagacaaacggagtagcgcttggcaccatctcatgaggatatgaaccatactacgtgctctcttcctagcaggcaacacatacatacagaggggctactttgatacactcattttcctatattcctctcaaccccctccaatccctataggaaatgatgttgaagtgcagaaaaaagttgaagtgctagatggcattctccttgcggccgcatgatccttgagaaacatgttgatgtgttgtgattgaagaacatggcacctcaaggctcaattccaacgcagcagctacagctgcaagaacctcccttaattgaggagcggcagcggctggccttgtttaattacactcaaaataaaccttttaaaatttttcatcttatcgaatcttgcaacacatgtatagaatattaagtataaataaaaaataactaattgtacaatttatttataatttataagataaatcttttaaacttagttagtttacaaaagtgttacgacatcgaaatctaaaaaaatataaactaggcagcaatgagaaatcaccacgcgggcaggcacatcggccaccaccaaccacgcagcgcagagcagagcggcccgattacggcccataatgtatcagcccactcgtgcttctaataagcccaagcccacaacatctcggcccactttaggtccgggccaacctgctcttcccgccacgccgccctctgtcttcccgccaaaaccgctcctcttatccccccaacttcccgccattctccccaacacttcgccgacagactcccgttcttccctgcctacccctccatccctcgccgccgccgccgttcccatcaccgccgctgggatgaagaaccccgacttcgccgcagacaaaggtacgtcgtcttgctgtggcggaacccccctcgaaccgttccttcgtttgccctcggaaggttccagaacattctctgatggcgcgtcggttcttggtgtttgatttgtgtgcctgcagcgctcgccaaggacttcctgtccaacttcgccggccctcacggcgagcccaagtacctgaacatcctggtacccatgatctcttctcttccccgtgtgttctagggttgtcccttccagatccgtttttttttcgctcgaaatttcacgctgatttctctctgtctcgttacagcaagatgtcgccaataggaagatacgcgcggtccagatcgagctggacgacatgttccatgtaccaactcctcacctccacaacattcagttccttttcttgtttccccccttttaccaactttgcggccgcaaacatgtgatttatgggtgcgaaatgtttgttttttttggtgtgcagtataaggatatcgacgaggagttcttgcagcgtgtcactgagaacacgcggcgctacatcggcgtcttcgcggaggccatggacgagatcatgccggagcccacggaggcgtacaccgtcgacgaggaccgggacatcctcatgacgcagcgtgtggatgagggtgccgacggcggcgccgacggcacagacccgctacagaggatgccaccagagatcaaacggttcttgtaagtggctctgtacgaaatttgtcttggtgaatgcctgaatggttgcctggttttgataaattggttaaacacaagagttgggcctctggttatgctccatatggaatccagagagtattgccttgcacgttattaagaacataaagcatattactgcttgttacttcagaatttaaactagcttttcttcctctgatttttctgtaaatctaaccatttcatctgctttgacagaacatgttagtttgttcaaaaaaaaaagatagaacatgttaggaacacttgcacttttgtggatataaggatatggattactgtactacaatataatatttcagccagatatgaacatttgtgtctcacattcttgccaaaattatctgtgcctctgctcccataattttcctgtctatccaattatcgagctctgttgatgttttatctaaaattgattttattttggcattgtagtgaggtttacatcaagacattctcaaaggcgactccgctcaccattaggcaagtaaaggcatccaacattgggcagcttgtgaaaatatctgggattgttacccgctgctcggatgtgaagcccttgatgcaggttgctgtttatacatgtgaagaatgtggctttgagatataccaggtacttgatctcgttttaggctcccttttaataatggtgcagtgtaggatatatatactgaaagacagaattttgtctccagtctaagttttatttggaatgaaacttttgttttcaatttggcaggaagtgacggctagagtgtttatgcctctcattgagtgtccatctcaacgatgcaagctgaacaaagcaaaggggaatctaatccttcaactgcgtgcatcaaagtttttgaaatttcaggaggtattaacctttcttcacaacctggtcatccagggttatctttcttcattgaaaggaccagccacagaacttgatcatattttggattccgcttccatataacaactatgctgtcttgcaggtgaagcttcaagagttagcagagcatgtaccaaagggccacattcctcgttctctgactgttcatctaagaggagagctgactagaaaggtaaagcaaactagtagctttcttccactttgagcagtttcctttgagttgctttgcaggacaatagcttctacttttctgttgttatcgccatttctgtatcaatgtactctacagtttagcttcgaaaggaagttgcttttagatttatgcttttggtttattcaattcactagctaaatgctctcatgagaattaagaactcagtaaagatattctgtaatataaccaagtactaaatgctatcatgagcaggttgcacctggagatgtggttgagatgtcgggcatttttctccctatgccatactatgggtttagagcgatgcgcgcaggattagttgctgatacttacttggaagcaatgtctgtcacccatttcaagaaaaaatatgaggagtaagtcatctaggtttcatgctgagcaatccatttgtcttctgcagctgtctgatagcgattgcaaaactgttgcaggtatgaactaaagggtgatgaacaagaacaaattgaccgattggctgaggacggtgatatctacagttggcaaggtcattggcaccagaaatatttggccatgaagatgtcaaaaaagcactgctgttactacttgttggtgcaccccatcggaagcttgcagatggcatgaaggtacgtatgctgctaggaatcagtatgatgtcttttctatctgaggctttgttctctccaactgttcacatctcaatattcactgtaatgtaaatgtacagatcagaggagacctgcatatatgcatgatgggagatcctggtgttgcaaagagtcaacttctgaagcatattatcaatgttgcaccaagaggagtgtacaccactggacgtgggagcagtggtgttggtcttactgctgctgtccagaaagatccagtaacaaatgagtttgtccttgagggtggagcactggtaagaccaacatcaccttataatgacatcttttactgtatttctcttttctactgaattataggtttatacctgtttgtgcttttcacaagcatatatatgtactttacttcagtcctgactacagctattgagaaaatatgtagttttctctttttaaaatctttcaacttgagatttcgtacttatattactggtaaaccttcaatttattcttgtttggagctgtctctttagcactacaaactgtgctagcacccccaaaaagtgttcatttggtccaaatcacaggcatgcaaatcttgctaataattaatctcgtagcacaaactcttgggttccaggtgctggcagatatgggcatttgtgctatagatgagtttgataagatggaagagtcagacaggaccgcaattcatgaggtaatggagcagcaaacagttagcattgccaaggctggcatcaccacctctctcaatgcgagaaccgcaattctggctgctgcaaatccagcatggtaagttttgatatgaatatagtatttcttctaggggggtaaaaagaaattttcatcagttgacaatggtaattgcctttaaatattcaggggaaggtacgatatgaggaggaccccagcagaaaatataaatctacctccagcacttttgtctcgtttcgacctcctttggttgatcctggatcgtgcagacatggaaactgatcttgaaatggcaagacacgttgttcatgtgcatcaaaatcttgaatcaccagcactggggttcacaccacttgagccatctgtactcaggcaaggacactattcctcgagtggcagtgctcatgttcacttaatttcaatttcatagttgaattgctcatattttagttggaagttccagaaactataaaacctgaagtacagataaaatcattgtgtagtatctttgcattatctaatacttgctattctacaatctttatctgttacagagcatacatatctgctgctagaagagtcattccttctgttcctagagagcttgaggaatacattgcaactgcatattccagcatccgccaagaggaggcaaagtcaaatgcaccaacctcctacacaactatcagaacacttttgagcatactccgtatttctattgtaagtaacttgactgttttcccttcacaataccatatgaaaaatctctctttaaacatgatgctgcttgcctatttcaggccttggcaagacttaggttttcagaaactgtggctcagagtgatgttgacgaagcactgcgactgatgcaaatgtccaaatactcgttatactcagatgaccgccagcggtctggccttgatgcaatatctgacatatattccatcctgagagacgaagctgctaggacgagcagcatggatgtgagatatgctcatgctcttaacttgatctccagaaaggtacagtttctacttctacatacacatatggtagaggtgcacaactcagtatggcctgattgctgaaaatttggttggtgctaaaatgtctgtgaatcacagggatacagtgaggctcaattgaaggagtgcttggaggaatacgcttccctgaacgtgtggcaaatccatccaagcacctttgacatccacttcatcgatgcttgatgcagaagtcaataccaatcacgtaacatttcatcatgagccaaggaatggaacatcaagagtttgtagcttcatggttcgtgattggagggaggaacacggtcgagtgaagcctaacaagatttaaaatttctagtgatagtgaacaacagcccatttcatgatgtcaatgatgtaatgctgactgctgagcagaagcctatctcaattgtactagtagagcaattcttgtctgacttatgagtagcttgttttctggctatttccttgtgacagttgacactaagtggatgccctgccgtgtttccttattgctgctgatacttgatagttgtatcaacgcatttatgccattgttttggcatcacgagggaactagctcaccacaatctcgtaaggtttgtcaaatttactggtaaggttttatgcttttggttaccaaggacacgagattatttctgctaaaaaggatggactttttagtggggacaactatgtggctgctattggtgtttttggtttaagtcatcgtagattagatgaaccatgtagggtctttctggaaattttggttgggacgacttcagtcaacattcatgtcactaaaacaagtgcttctgatgaatgttgtgatggatccccactccatccctcaaaactaaacaggaaagtaaatgattaccatccaactcagaccaaggtaccattggaaaattgctaaaatattgcaaaatcaagaagcatctaacataactcttgaatgattacaagttaaacacaccacaaaactgtcaagtcaaccaatttatcctatattcagaagaaactcaactgcagc

SEQ ID NO: 4879 - DNA, 2623 bp, Sorghum bicolor
aaccatatttgcagtgatgggcagggtatctaactgaatagtttcttacttaactgtgtttcacaagagagagagagagagagagagagagagagagagagagagaggagaagaagaagaatttgcttattcggttttagtgttagtcagaatcacactcaaggctcagaaaaaggctcagattctttcaacttctgttgtgctaacttcagttgacatcttatccttttctggacctcaacaaatttgttgaagagttcttttatatgttgaagacttgtgtcttccatacaaggaaatataatcagctatttgtgtagtttgtgtttgtcgcacatctttgggcctgtttgattccccttgttaaatttagccagttgaactttaatcactttagtagttaaacttctaaacacactgattaaaaaaactaaaatagcgtagtccctttagtcattcaagagtagctaaatagttttagatgactaaaatttagcaagaaaaaccaaacagatcctttatgtatgttgtagtgattaaaattgatctcacttacgaagcttcacgattcctttcgcaggatctactcaagctggacaagtttggttctcggactagcacacactgcctcacctcagcagcctgcgcaagcttaccatgccagcgctagcgagccaaattcacttgcttgcagaagcaagcaaaaactcactagatcaggtcaatctcacccagcaaccaaacgactgtgtccctctcatttctaactcaacaaggctatacaatactcatcaagagaatcaaacatatcctagattttgcgcaattgtatgtgtttattatccattatccttatccattgataatttgcagggcaaaaaagaacctatcatgggtccactgttggctgattttttggcaggtgctgatgctaatgctgaattgttgtgagagtgttttctcttccatggttgaaaagtagtgcttatattttaggcttctttgcacgaaaacttctgaagaagatagtgaactatattcctgaccacggcaaaatggatggaagaattattcaggaactggtttttttcttaaaaaatatttcagctgatgaactttttttttcctttctaatatgagacagtgagcatgctacatttgtgtcccacctttttacataggctgtaactttagtttctaaaataaagcttcctttatctaaaaaaaagataaaatgtttgagatcatactatgatatggcgtttgtcaaagagctaatcgattagaacttcatttcttcaaatgggacatgtaggttactgaaacaaacataaaaagataatgtcaagaactaggttgctgaaatgaatagtgtccagaaccagagttttacatgcgatgcttgtttttctagttgtatttgcattgcaattaaaaggaacttcaaagtaaaagtatggtgaggacttaaatgactgttggtgcttgtttttctagttgtatttgcattgcaattaaaaggagctttcaaagtaaaggtatggtgaggacttaaatgactgtttctacaacaggacatgaactatcgtaactgacagatactccattgccgctgagacaaacaattcagctacgaacccgtcatgaggccaactccaccaaagcagagcttgttttttttatgcaaacaggaaatgagtgaaattttcgaaatagcaatgacaaaactacagttgaaatgcactgcacaagtagcttctaagatgaggtaataataaaaaacataattaattggtgctgcccaggttcgaactgcagacctttacaccacagcgccactgtgacagtaattaactcagctagttacagaaacatcggactttgcattaaccacttaacaaggaaccaagatgacaggagaaagaagacagtgcatccactaaaagatacagttacacatttgcggcatcagagaggacagctgagggggttagattttattaacttcgtgctactgttggctgttaatgttgttctacatcagctataactataacaagcaacgattaaacagatcaaatatgtgctatacaggtggggagatcaatgagtatacaaattgaattctgcgcatggctgagactaagaggagcagagctcctgccattacgttaaaaaaagagagagagactaagaggagcaaatgcttctatcctaagtgtatcttgtattgagcaaatgcttctatcctaagtgtaccttgtattgaacctaaatgtcacaacataacttaatatcatcataagggtattgcagatccaacaagcaccaccagccaagtaggcgcctgcagttttcctggctgtgttggggaacatcctgcctcatctactatctgcaagatgtgatgtaaaattttattaggactgattaatattttatgtttggacattaatagtagtagtttccattttaggtaatagcaaaactgaaaatcagggatgcaaatatcttgccagagtataagaatcccttgtcaactaaagttcaaatacttttgatcccggatttcttaataaagtaaaagcatagatacaaaaatcaatacttacactgcctgaac

SEQ ID NO: 4880 - DNA, 10412 bp, Sorghum bicolor
aacattggctgtgttagatcccgcttacattaaggagtgtaattgtatgatacacaacttagttttggatcctaactgcataagtacttaattttattcagtaatggcagtgtggcacctggcattttgtacattggaagaggggaatgtcacatttagaatgacatcatgattgtatatattcatgttgcaaatttgttaattgtatttatatttagtatactgtacatgttactattttctaaaaccatgtgttaactgtcatgctatgggaatctactgacatgcactatttcgaaatatttggccatggccactagtcacagttgaactacttttgtcttttacttttgctctgtttttctttggggctattgtgaattaagaatccatctcattcagaattgagattttgttctgcagtgcttactcaagatccttgttttacttatattgcattatcacaaagagttgaacctacagcaagcttttaatgagtatctcctatctcggtagatgcccagccttacattgagaagttctgttatggttccgctaatccatttgtcaccatgtgtgcaggatcgtctcactcccggctaacctggatttcatgatcttcaaccaccgcggaagagcgctgccgtcagactcagacctgaaactcaagatatagacatgtcgttccagaatccagatcttgttttttacttacttgtaacctggaggaggttccagttttgtgcccatttgtttaggggggaaaagaacttttcctgaatttggaccacaaatagcttatctatgctgtaactgagaatttgtggcacttaatttctacaatctgtatggatgtgattcaagcttctgttgtagtctgagcagatcaatcatgtgactaataagtagctttgttacccttgctgatattccaattaacgaatactaaatgcccgtgcgccagtggagaaaataatcctatttgcccgctgtacattgctaccatcaggaaatagaataatcgtgaattttgggtaaccagccagaccgtgaaaaattctgtcaataaaatactaccatgtgttctagattataagtcattttggtaattctagatacatggtttttactctatatttagacgtaatatatattgagtgactctcaaaagtttcaaattataagttgttttgatttttttgtcacatccatttcactgggtatctagatataatatagtacgtctagatacatagtaaattatacgtagtacataccaaaaaatcaaagttacttataatttagaataatttagaataggagtacctaataaaaactacgaatcttaaaaaagctaaaacgtcctataatatataaactaagggagtacttcgccttgtttagttcatttcaaaatctaaaatttttcaagattcttcgtcacatcgaatcttgttgtaaatgtataaaaaataactagtcacacagtttgtctgtaaatcgtgagataaattttttaaacttaattagtttatggttacatattaattaccaaatacaaatgaaagtgctacaataacaaaatttaagaagtctgaaagcagaagaggagagaatattccagctagactgttcaggccgtctggcccggaaatccgacggctccgcagagtccatcgcggccccagacaaaacgtgggaacaggaatcccctctcgcgcctccctctcaccaatcaccacggggccacgcggcacgccgtcctctccccttactcgcgggccccaccggtcaggctctcggccgcccaccccaaaaaaatcggcccgggaccccatcaccccgagctgtagctgctttgcccccccctccttgccctttccgttctcggaggaggacgagggcgcgacggcacgcgaaagcgacgcggccgcctcggcctcgcgcaaaaaccctcgcctcgcttcctccctccctccctcatccctcccatgacgggccccaaacccgcgcccgccgcctcgcagaaccctagcgcggccccgcctcgccctcctcctcctcctccgcctccgccgccgccgccggtgacggcggttgcgagggcgcgcgaggaaggcgagctctcctccggcgccgacgacgacgaggtgagctctcgcgccttctcgacccgcgctcgctcgctcgcttgtcctggatctaggtgcttccgctcccgcgcggccgcgctgcagttgcgtgccgttgacgctttgactcgtcccgcgggcggctagggtaccaagcttggatcggcggggccggggctgggtgcttgcctaggtgttctgatgaagcgtgctcgatttgcagcttggcgaattgtttggggggatggacacgttgttgtggtagtgcctctaagatctggcagcggcaggaagagggcttccagtatgggaatgggacttgatgcatgcttagaagctcgttgtttggtgtttaggagttaggactacgacacacatatagggtttaagtaaatgtgatctgattctgcggttacggttgagctgtcttaacttgtagtgcggcataattcaatgaaggtgtaagagcaaataggttgctgatgtgtgctttctgcaattctgcaattctgctgctttaagtgctgtgagattctgattggtgtattaatgcactgcatttatcaacttctcatatttatcatgtatacatgattgcatatttgtcacctgtatagtattatgtatgtatgtatgtatgtatatatgaacgtaccaatgcatttattgccgatacgtgtgcttagatttgcaatgtttgtcgtttatcgtgctcattaaattgctccgaccagactctgcaaactcggctaggtgctacatccattcttgggaagtttgtggaggctggatctcaagtgccatcggcaactctccttggtaaaggtacattctgacttccgattagtgatcctgcatttcatgttttatgccagtttccttccatggaaagatagcctgcctccttactgatcctgctgcgttacctgttttcctctgacttgccaggcagtaacaccttgattgtctcgaatgctctgaatcataaagtgtctgctccaagttacaagaagatcatgagggcgaatcaggggcaattcaaaccgggtactaatcggaatctttcatggcagaagcctgtgtcaagtgataaccttgtgataactttctcagatgatgatggcgagacagactctggaaagacaagacaaggtaaagttaggaaggccagctctcaaggtacacagagaacagggaacagtatgcaaactaggatcatgagagaggaagtatctcagcagaaaacccttggtacaaaagtaggtcctgcacacttgcctgcttttccattcacacacagaaatgtaggggctggcaggggatcaggtaatacctttgtcaggaaagagccacctgtccgccaagttaatcctctgaagtctaaacagaaaattcaaaatggggtaggagtacattctgaagatgataggttagaaatcttgcgccataaaatagctgctagagaaaatgaactaaaaggtcaaaaaagacctttgtccgctgttgctacaaagaatacagaattgtcttccaatcagccaaggctgccatcagaaaagatagggcttgaagcttccaacagtggtgaatattcacgctttaatagtctgtctgaacataatggaggaccaaataaaaggttgaagctcaatcagcagaattcgaacagccaatttcgcagtgacctggtaacattcgcacctattggttctacatcagggaaaaacaatgtgcaatcttcagaagtgacaaatcagtttgaaaatggaatttctatgaaccttaatgtcaatgaaacagataccacagccacaacagaacattcagatcaaatacaacaaggtggggcaactaagagccttcatcaccacaaagatgctggaggtgctggtaaccatgctatgcttgagttgcacgatgggcttgcagcacaaccaccatttactgacacacaaactgtaccagaagatactagtgctttggcgcctgtcacgtctgcccaagctaggcaacaggtactgcctgttggtactccacctgtgttagatggaatgccacaattgcaacctggaaaggaggttcgttctgcactcttgttttgctctacttatttttcttgtttagtaatacatctaattagctgatgctcagttaatgcttctgctgttgctaacctgctagaatgcccccttgaatgaactattgagcttgaatgcaattgagacgcatatagcagcaatttggggccactagaatttttgtattgattatacctgacactaaacttagaggggttccttatgggagcatctatttcagaacgtcaatgttttgatttgattgttgaactcatttgagtttcttttttctggaattatgttttactgtgtcaaatttcattgtgtaaggtaaggtcaattccccttttctattttttgcagaacgccgtatgtttgaactgcagtgtccagataggcgtagacacacggaacacaacattgttctctctacttgagatggaagaactacaagacaaggaattggaggatgctcaggagcatagacaaaaatgtgaagctgaagaaagagaagctcttagagcttatcgcaaagcacaaagagctttactcgaggcaaatgaaagatgtgcaattcttcgtagaaaaagagagatttgctcttcacaagtccatggtttaattgcagagaattcttctttggtgcagtctttgagttttcggaatcctgaagatggccttgcaatgccatcactgctcaattctcagattcatgcagatagtcagatgcctgaaaatcagggtggtaggcacaggctttctgaagaacattctgagcagccagttgataagcatgaggcacggccacactatcatgataagcttgctgccagcacagctgatcccagctctgtgactgctgccaatgctgatagcgtcctttcagattacatggaggatgatcttctcttccccactagacaggcaagatcagaatgcactttggatctggagaatcaaatggaagaaactatacatgtatattctgaggaaaacagacaagtttctggtgacagtgctcaggattatgaacttttagaagcttctttgaggtctagattggttgaaagatttgggaagaaatcatgcttgaatgtcaccattgatgaaggcactgaagaacttgctcttggaaaagtagctgcaggacatggcaagcagtcaatgtatgttggacatcagttacaggaagcagagcagaatattatgacaactactcctgaaggttatatcacttgggtttctattaatacttctaattctatacgtaatgatctgtatatgtgttgaggcgttgcagtgtgtactgatttaccctgcaagcatccattcatttgataagctatatcttccatctttgtgatggatatgtttaggctctttaaaatatatactacacaatatgaattatctttactaaatattgctgatagtgagttttattactgttgcttgtttgcttgggcttatcagccgaatctgccagccattcagcagtgtttttctcttacaataaatcagccaatagtactttctgccatggcttatcagccaatcttttcatccttacatggaaatatattaaaattagattcttataggatgaagtcattactatttagaggtattgattcttttttaatgttgatggataacaatgatctaaaactatgcctatgcagacaattgggcatactagtgtggctaaaagctatgtttctcagtttgctcctttcattttaggaaatggactctacactggctcatgtgaacttctttgtaagaatactttattttgttgtgcaggtacaatggagctggaaaacgatggtgctgaaaaaactggcggcctctctaattctagtagtggtccttcaatgggcaactgtgatcctgaggacaacatttcttctctcaaagagttatgcatgccattggctatggacactctcatttttccttcttcagctccactaaatgccgctagacaaatcaagcgagcattacctgggatttgcaaggacccttcagattacaaaaatgactatctgaccagtgatgcagcgtctgaagttacagaaagtgtacaagatatgatgcatgaccttgttggagaaaatatgaagattctcccaactacccaaaaggataataatatggtacacagtgtgattgatcctttctggcccttctgcatgtttgagcttcgaggaaaatgcaatgacgaagagtgccagtggcaacatgttgagcatcatgcttggagaaagccaaagcttaaaaaacattctatgacctctgtttcaggtttgctatatttacaattgctctcttatcgtgttgattacttgactataattccataatgcatacacattatgcattatgaatgctgtttaatttattgtaacggatgattttatgcaggccagattccttatggtttgtctcagcatattcttcctgtgccagtgtatcttgtcggttcaaatcttattaaagctgatctgaacttgacacagtcagttttggctagcagtttatggcaatattggcaaagggggttttgtgcttcctttcctttacctttatctgttcaaagagttcttccatcagatgcaccgttcttacaggctggtgatggctggattgctgattttgataggaacagacaactattaaaatttcgaatgctggatagcaggaaggtgggtagagcgcactgtattgcagttatcatcatatcgcggaagtgacatacacattggagtctggttctccacactaaacttattcttgaagtttcctgctctttctattctcgtgatattattgcataatggcatatcaattattttgatcaggttatattggtacttgttaacactgcactcttttcttgtggtttcattgtttcaatgcaaaaatactctgaatttgacaattgcttctgtactggaccaagtatttgccaccacctatggggtttaaactttattagcatacatttcatacttatggtgtttataaacattattagcatacatttcatagtagttggaacatgatgaattgacatttttggtttgaattcatgatatctgatctgcttgtattttgattattgctgtgtaactttttattctgtagaataagattgtacagggtcctgttgatattgaattattcttggaggcagctcttgatttatattgtggaaaaggaaacaagcctgaaaggatcaaggtgacttctgtattggatattgtacccttcagattagaacatgttttaactgcttctacgcagttgagttcaggttggatattgttggccattagcttatctctaaataatgtttgttttgcaggctctttcatttctggcgcggtctattgaggctgatccaagtacagttatcctgtgggtgttttatctccatatttactatcaaaaggatgaaggacttggaaaagatgacatgttttttcatgcggtaaactatttactggttgttcttgccatttagtttaagcctaaaaattttatgttggaatgcatgagctacagatgctttttacttttttttttattacactgcttgttctaatgtatcaattgcttatcttattcatgcgaaagctaaattttgttcatttggtatggtttgcttgattatgattacatccctctaatgccagattgtgcttcaatcccaatgtggtccatctcgttttttactttttgtttttaggacatgaaaaaactttagatgagattgagggcatttcatgtttgtggtttgcctccaattgatgcatggttgttttatcatttgtagatgctattgtataattatgaacaaaccttattgtataattatcaacaaaccttatactttgttttctttctaggtgcaacacaatttttgttcctatgaattatggcttatgtatataaatagtaggttacgtgttgatgatcgattggatacttataacgatgctttgagcatgctctgccaaatgacagctgacagtgacaaggatctacaagaaagaagtgctttcatactagacatcttcttacagatgatttacttcctgtgcatgtctggaaatgtagagaaggcaatttctaggattattggaatacttccaactgcaatgcctgataattgtggtgacaagttgcttgctgatgtcatttctagcttgaccatgtccgacagatgcatattttggatttcctgcctatatatctcaatttacaggaaccttccagaggaaattattgatcagctagagttccagaaagctttgcctcgtgccttaaaatggccttctattgatcccagcgtagctaacagagataagattatagaacttttaaattatgctgcttataagatggctgaagatattagtgagtgtgttaaaaacggggatccatcttacctgatgttatcgcaattcctcactgttaaccacattagttgtctagcggctgttgaaggttttaaatcttctgctgatatgctggtgacgtacatgaaggagtacccaatgtgtcctcagattctgcttatctcagctcggttagacagaaagcatggtacatgtcctggtctgaaaagctttgatgagttgatcttgaattggcctaaagaggcacaaggaattcaatatatgtggaatcaatatgttgagcatgttctggccactgataccgagttagctgagaaggtactgacttgctggtttgatgaacacggaaaagattgtgatatccaaaccaattctgctatttgtatagaactgagcagcgaagagcctggaacatcatcacttgtttctccccaggaagttggctctggtccatctacatcagaagatctcatctttcggttattaaacctctcattgtacaagatactagagaacaacctacaggaagcacaaattgctgtggataaagcattgaaattggctcatggggagtggtacgagcactgtataagagaacatgctgcaattcatgcactggagctggagaaatcatcgtcttcgacagatgctcaaactcaggctacattcagtttaatcattggttaccttgcagataatcgcaacttgccaacaagggagctgctgtcacgaaggttttgccaaaatgttaagaaacataggcttaggcagcttatagatgacactattggttctgttcctgcagattcttctctgataaactctgcccttgaagtgtgctttggtccgtctctccttccaaaaagaattggcgatgtgaagtacctggtagattttgttgaaacggtcatggaggctcttcctgcaaactatcgcctaggtttagcagttggtggatttgtagctaagcacttcagtggttctgatgcaacctccactgggaccaggttctgggcaagttctgttctgatcaacgccatcttccgagctgtacctgtcgcaccagaatcagtatggctagaaggcgcagatctcctgcagaagttgcatgtcacagagattgtaaagaggttctaccagcaggcagcatcggtctaccccttctccttcaagctgtggcacgcgcatctgaattactgcaaagccagtgggagcaacactgagagcatcgtggagaatgcgaggcagcgtggcattgagctgaatccgacaccaacatagtgtttgtccctttgatccaaaagctgcctggtgtttttgccaggtggagatgtaggtagtgttgtgttaaactggagatggcgtagatatatcggtgatcatggtatggtggtgactggtgactggtgagatcattttgttctttaggtgcaggtttagtgggacatagtcgtcgatagcttacagcttggtgtttatggagtgatgtggtaagtagtaagtagtggtgaaggatacaggcatatgggggcatataccatacttttggactagacgggctagagaatgtttttttgactctgttatgtttacgtttaccgttctcttggttctctgtcgtcgatgtattagctgcataactgctacttataaacatgatgatcaatggagaaatgaaatgggattattttggggttcattcttgcagtttctcattggtatactagtattattccgtatgttaatatataattcagtgctttgtctgctgaaca

SEQ ID NO: 4881 - DNA, 5195 bp, Sorghum bicolor
tagattactcaaatcatgatctccttatatatatatatgtccattaaatgttgaaagagcatctaggcccctagtgatttcggtgattattgacattattgattactatgactaacgtgtgttttgcagaggcaaagtcataggtaaggtcatggtatataggtactcgatggacagggacgtacatgcctacttaatagtggaaatcgtttcggttttcaaaggagggatggacatcgtcaagacaagactaggtctaagtgccatatggtgaagaagggcacttagagtagtttaggactttgttcttcttttgaccgtactattaagaggggctttgatctagtagcttgacttaggcaaggctttaggtttaggtgtggtgcacacttggtaaacctagcactaggcagctcagagatagtccttagatcgagaggaacaaacttcgtgttggagcgttcacgtttcgatgaagtttgggtgcccaaaggggcaccggacgctgcaccggacgctctgtgagtgcgtccggtgaggtccttagccgttggaacagtttggtgcttagggttaggcaccggacgctggcaccggacgcaacgggcagcgtccggtcccttacccagggagcttgcaaagttcccctgagcaccggacgctagcaccggacgcaccgggtagcgtccggtcccatgcgcagggagcatgtaatttttccctttgcaccggacggtgcaccggacgctgagagttggcgtccggtgacctgtcagagtgaagtacagttagccgttatgcagcaccggacgctcggtgcagtgcgtccggtgcaacataatgtgcgtccggtgaccccgttttcagtggaaaacggttggctgacctttggacttcgtggatagtatttatacttctccacctcgtccatgagagctctcttgcccatttgaacatcagagaaacttgttgtggagcaagagagttgcaagagcctagagaggattgagattggagtgatttcttgagagaatccttctctagtgagttccaagagtcaagtgtgcatccaccactctctagtgtcttgtttgggtcaagtgagagttctttgcttgttactcttggtgatcgccatcacctagacggttcggtggtgattggaggcacgaagaccacccggagttcttgtgggtggctcgtgtcaagcttgtgagcggttttgggcgattcaccgcgacggagtgtcgaagaatcagcccgtagagagcacttggtccttgcgcggaccaagggggagcaagacccttgcgcgggtgctccaacgaggactagtggagagtggcgactctccgatacctcggcaaaacatcgccgagcaccttcttccactactcctttactttctagcatttactttgtgtttttacattcttagaattgccatgctagaataggattggaactaggttgcaaaactttttatccggtagctctctaagtcacactaggcacaaggggttgaattggagcttataggttgcttaaatttttagagaagcccaattcacccccctcttgggcatcttgatcctttcaaatgtgaacaataattatattattcctactccaatttttccatatcttcacaaggaatggttgactgttagagatatattctctccattctaaattctaagttgctttgacttttttggtgcatctattttgctatgtatctagacatatttatatatctagatgcatagatgcaccaataaaagtcaaagccacatataatttagaatggagtgagtgccattactcaagaaacagtatgcacctagagatataccactcctaaaaaacagtgggctcctagagatataccaccatttaaaaaaacactagactgctaccactaccaaaatttgctataaatattggtcaaagcaagtctcattagtagcacatgcaaagagagctagcggtgcttgaagatgagcagccatgtttccatctcagtggttgtcatcgtccttgtccctgttgtcctcctgctcaattcccatgtagggttgtgcagctgctacaagcgcatcttcagttttggcgatgatagtatggatactggcaattttgtgcatttgattgggaagaatgcatctaagtacaaggaagccccctatggcaatacattttttaggcacccaactggccgcatgtccgatggccgtgtcctcattgatttctatggtgcgtatattcctttttcactaaatccttttttttggttaaagctaaccactcgagcagatccaagcctctcaacacttgacttttttttgaagaaacatatacatacttagaaattttagattagtaaatctattctgaatttgtgttgaggaactccctctgaccttctccaactttagttacagctctagcaacctccttccctagaatgtagttaggataagggttgagagattgtagttaggcctctaacgatcttattaatcacttattactccttccagtcaacattaaaatttagggcaacaaaaatagtctaaaattagttcatttatccaatcctaaatgttagttgatgttgagtagatgatgtggtattaaggggccgttatgctcaaaactaagtttgccacagtttttgttttccctaagactagtaaggttaatcctgcaacccttttgtggcaggaaaaatatcaacttattaaccttaggcaaaattagggaagaaaatctagtctatgtcaactgggacaattgactaacaaagtcttggcagcaactaaatactgctaaagaaaagtgtgtctactggctacctaaagttattcatggcaacctcaggcagttaggctacaatctaaataggtcctaaactaatccatcggaaggatggtatgatggttggcaacggctggtgataggctaaggattatggccaaatagggagagtcggagtgggctcacatcaaaatgagagattagtatggtgagatgagtagctagtgagagttgtttgagacaggagaaagaggatgggtgagggacctagcaaactagcaataatggtgtggtaggttcaggtctgagagaaactagagaaaataagagatggggacaaaaacatatataggtaattggatctcaatccaagggctagaaaattcaagtgcagggtggccccaaaacactcatccatttgctagtagaaattaaaactactccttttctttctggaaaaacttttggttttattcaccatttgtttaatgccatatatattataacagcgcaagcactgaagctgccattgataccaccaattttacctaagaaggactctggacattttccacacggtgccaactttgctgtgtttggtgccacggcacgtgagcaactcttctactcaggcagcccctggtgtctaggcacacaaatgggatggttccataatatggtggatcgtatagctcctagagacggtaacaacagcatacaacaatccaatcctaagacattcataatgaattcatgcacgatgtgtagaatatgcttactgatcaactcatgcatccatttcatgattgttttccctatatatatcagctgccaagaagcaatttctaagtgattctcttgtcgtgatgggtggaattggtggcaatgactactactcatatttcatcgccggtaaacctagcaaggatggaaatatcattccagatgtcatcgcatacatagaacatttcatcgaggtgcttgcacgtacaccaatatatgcatcctctttcttataaccaattcatttgtatatatgtcacatgcttatctgtatatgcatgcacacaggagcttatttgcagtacaggtgcgaaagcgttcctgatccccaataacttccccattggttgcttcgcatcatacctaagtaggttccatagtgacaaccctgaggactatgatgagcatgggtgccttaggtggttcaacgagttctcgcagacgcacaatgaacaactttattctgccatcggacggatcaacatcacttaccctgatgtgaagctaatatatgctgactactacaatgccaccatggaattcatcaagaaccccggcagatttggtgagtatttactagcttgtgttctacatgtagcctagcccccacactcaactcctagtcaagcctagccccaaactcaactcctagtcaagcctagtttgaagacaagaaaattgcatgtggataaattattctcactagaattttattatatttatatgttcatatatatgtctaatgcagattctaacgtagaccaatgcactttagagtttataatatccttttgctacaatgaatcgaacatcattgatgttatgtatgtatctgattgataattaatgatgttcatacatgttgcttgtgttgtctttgcaggtattggtaatcctctagtcgcatgttgtggcggtgatggaccataccacaccagcatggagtgcaatggcacggcaaaactttggggtgacccacaccactttgccaattgggatggcatgcacatgacagagaaggcatacaacatcatcgtggaaggggtgctaaatggaccatttgctgatcctccatttccacggagttgctaggattagctagacttggaattccttgcaacatgtatccaactattttataataattgtagtgttttgtctttgcacttcttcaaggaagacgtatctattcaaaattgttacaagaatgcacacccaaagttataatttaagttcaaatttattgtctaagatagtaaatgaaacaccacctattagaaatgaagaattgcaagcctcttgtctctaataacttgcacgcctcaatcatctattccttgagtcccatgaagaaaacttcctcagacaattgtggcatgatgagaagtaggtggctaggaggatataactagataggagagggtgcagtgtggaaagccgtatagaaatgcactagctttttgtaaagtagacaaaaagttaaaatttcattttctttgggttgaaatagtttggagaattcattgcacttcttctatttttaaataattatatggatatatgatactatgaataagtaggacatcacaaag

SEQ ID NO: 4882 - DNA, 7338 bp, Sorghum bicolor
ctcgagagctagctaggaggagtagctataccaatggcgcgtccgtctcacctttgttcgccgccgctcgtacgcatgcgccggcgccgctggggttttgctgccattctgcggttccctgctgctctcgtctcgtgtggtttcgtacgtcgtgggttggtgtgcgtgcgtgcgtgggcgtctggtttcgagtttcgacacaccaccctggcgtgcggttttcccggtggatttttcctcgcgaatgtggtgcgcgccggcgcgcttctgttgtctgaacgccgccgatgatggttcgccgaggcgcgcgagcggcggccgtgtgtatcagctgggatttcacacctcatttttcttcgcttttttttttgtttgtttgtttggagttgcgatcgcggacgacgatcgagtgtgcgtgcggcgcgtttgtgttgttccgctcttcctcgctgcgattccgtgggggcttcagcgggatttggggttttctccgggaggggctctctcctgcgattctgcccggtttcttcgctcgcgagttccgccggtgccgtgtgtttcccaggtcccagcatgcagcgcgagcgccgccgccggtttcggctctacgaattccggccatttcgctgagttcttctctgctgctcctctcgaatttgtgcttcttcacccctccgccgcgcctcatcccggccggccggattctgacgtacggttgtggttttgttgttcgtcgctcttagggtttcgtttggcctccgcgttttaccgtcctttttgccattggaaggtggttggagctcgtcggcgccattgcggttttttcctgtgacgcggtttactccgatcgatttcggtggtgctgggtagcttttgcagccgtgttgacggaggggatgaaatttctgcgcaataatgtgggagccctcggttcctgctctctgatcaccctctccatgtgccgcccattccatcatcacattctatttctagctttgcctttgccttgggttttgcggttttccatggcttgctgagttttacttggcagattcacgcgctggcgttaatgacgtttctgtgcggttcgattgcgatcccaccatcatccatgctatttttgggatttcttcgggggttgggacgtttcgtatgcttccccgttctgaggtctgctgcctactactactgctactacttcctaggtggtgaagaaatctttggcacaaatctcttgcgtggccgtgtatcttcgtatctggtaccagtccgtgtcgtgtcattcgcatctactgtacgtagaactgaccagtggcattgctgatgtgaccgagagctatgttttgtcaactggtgatttgaccatggtctgagcaggcactgtggcttggtgtgaagtcttgtctcttctgcttgttcttacatggggtcgtcaaatggattctttatagcattccgtttttgtgtcgatggaggagcttgactggctgcacttttgttttcttttggtgatctcggatcctttttcagttccgtgctgtgcttgaagttgagtaattttggaagttcgttttaaacctttttcgtgagttgcttgggtactgcattaaattcactagcagtagcaattttccgcaaggtggctgatgcctttctcgggttccattctgacttgtctttgtagtggcaacccaaggatagcatgctgcaaacttgaattttgttgacagattccactatggcctatcctttttattagcttgctgtttccagaccttgtgcttttgattgccactgttcgtagaatgcagggatcgttgaagtttggatcatgaattgcttggggatactgcaataagagttcacctattatacttgtacaagttccaattaaagcaattcgagcaatttggtcattgttttgttctaatacagcttgttctcttttgaattcgcagaactcaagtgaagaaaccagcggggcaggaaccagaggcagcatggagcgcgtgaagcacgacaacttttgccgcgccgtcgcggaggacaacacagccctcctcctctcggcggtggggaacttcaggaaggaggccatgtgccgcatccgcaagggctccgacgcctcaagggtgctggacaaggagatgtccacgaggctgctccacctcgcctgcaagcacgacgcggtggagtgcgcgaggctgctcctagagggtggcagcgggatcatggcggcccccattgatgcaagggaccagctcacgcggacgccgctccacgtcgcagctgagacacactcggccaggtgcatacagctgctactctccaagaacgcccgcactgatctcagggtggttgacgggagaccacttctcccgcttgagatcgcgctaatgagtaggaggtatgtgaatgtattccattgctagtaatgcatgactttgactgacttcagtccccaaatttgctgcaatataactgtactgtaagataagatgtgtttcctcgttttgttcagagttcaaactaactggtcggtggagaacccaattgaggatcttctgtcttttcttaaacaaagggttcgtatcctcaattattacacttgagcattgtctgaattgttcattcatagctattctgtatcattaaatgcatctttttaaccaagctcgacacctctctctatgtgtaggatctcgatgcagtaaggctcctggcagagaaaaccagagtggtcggggagcttgcttacagatacgccatggaaggaagtatccctgcattggcaatgctgcttctggtggttgaagagaagatatcgtcacatgtgagtgtggtgatagagggagtcagaacaaagcgctcaatctacaactccattgtggatgaggctttatcaatgggagatgcttcagctcgtgatggaaatgaaaggaaaaaggccctgctctgtgagattcagctgcttaaccaatttggatcggcatcatggagggaccacaatgacaggagaacactaccccctctattgagagctgctaaggtaccactcaccattgttcatttagtaacgcataaatgcctttgtcagtaggatagctatttccaaattgtatatgtgagggtgttcttcatgtcgctttttcatgatatctgactgaactacgtatttctataaaatgtaaatgcggctcttagttactactataactagaatgtgaattgtgtatccaatgtgtgtttgcgggtctaagctgattttcatgaaaaatgaagctaattgtgctatgcatcacatgctgaagtttttaaggctacagcttgtatctctacagagacttctgctgatcagcctttcttgtataggttggagatatggatgtcataaagatgctcctgatggggaatgttgatgtcaatgaagctgactctgaagggaacacagcacttcactggtgccttagtggtgcttcatgtaccaaggagccaaggtgcacatcttagaaattacatattcctatccattgtatcataagatagttgctttcttacatcttagtttttctgtcattgtgcaggattgtgtggcttctgctgaagaatggtgcaagagttttccaggggaacaaattaggactcacaccagtacacagcgctgcagctaagggcaattacaaagctcttcaggtatcctcttgctacttacttttctaattactctgttgtgagttatgagagtgactaattggttttatttttcttttcttcgaaagtcacttctgcttcatgctcaagattgtgttgatatacctaccaagaccaaagaaaccccattattctttgcagtgaagaatggttctgtggattgtgtaaaacttcttttgcgttttggggctgataccaaagcccgaaacctgaggtgcgtaaatcttcggaggacagtcaactaattgaattacaagttgcaaaatgaaaatagaaagaatgatttagtttagagtctgatgcacttatcattctgcaattatttgtcatgaacagaaagcaaagaccaattgacgtggcaacatcccaagacatgcgtttcattcttagctctgcaaatgtgttaccatgtaagctctatatcgacatctgcttcatttctttcttgtagtttatttgatctctgcagatgtaatgtaatggacaagccaggagttcaatttgatggaagcatttaattaattaaattgcatatagattggtaacatttctgttggtattactaaataactgtggacatgtagaaatttccattttattcgagaacatagaaatttccattttaacagaaatgtgttctagcttcagggaaccatagctcacctcaaaagaaccgtgtgatgagaaaggaaatttacaaagaacttcttggtgatgaatttgacgatcttgataaggattactgtgatgaaaggtatgtctgatatacactacatgatattactttataacagctactctacatgattacttgaattataacatctttacgtctcacctgtaattgctttgaattttgctgcagctacactgggctgaagacatcagtaggccaacgtgatttccgttccagtaatcgttctgcacaagggcctaagagtaagagccaatatgttccaaaacaagcacaaggttcaaagtttgtgcctcgggtaagttaagcatacatccctatatctgtcaatacttacctttttttgttcagtttgcttcttacatcacattcttttttagaacaatcattggccgaagcatgactacactcgcaaaatttttgttgggggcctcccaccttcagttgactctggtaaaacttcataaatgctgcactgtttggtagttaactaaaccaatacacacttctaactttctatgttgttcctttttgacagattaccttattgaattcttcaatgctgaatttggtcctgtggaggaagcagtagtcatcgggataccaattggcaaccgagttcagtctcgaggttttggctttgtaaaatttgagagagaggaggatatgataagtgcaaaggaagctcatcatgtttacatgcttgggaagagagtggaggtaaaggatgctgttgctagagcatacttgcctttagaagaccaaagatatacttctttgagggaatgcatcaaggagcgcccaaaggtacacagggtgctggatggtgaactgactgaggaacacaacctccagaagcggcaaccattgccagaaaagtgtcttccatcttggttctttatattcaggaagtggttgccaggatttcttgaggatgaaacagcacgacttggaggagagaggtatccgttgagctctctgaagggtgatttcagagcaacttgcaggatggagcttgatcacaccgcacttggttatcctaagctaagtgactttatgcgctccctccctggaatctgcagaatgtgtgtagttcctgttggaagtggacctgcaacgcacatggtcctccttccaccactctcacgaccgaagtatgtacccttgctagagccttgctcctttgatcgtgatgagcttgcagaatcagtgtcagatcatcactccccaagatcaccgcttaatgccaacatcgcggatgactccccacataacactgacagccagcagggtgatgatgcatgcagtgagaccaatgttcagatcctgcaagttgatgatgcatgcagtgagacttgtgttcagagtcagcatggccatgagagcagcaggagcagtgctgaaagccagcaggatggaagttcctctgacaatggtagcttactggacgatgttcctgtcagtactacaaagcttgatctgattgagtctgtaacttcagtcaagcctgctctgattgaatctgtacctcgaagaaaccctgatctaactgaatctgtacctccaagaaagcctgatttggttgagtctgtacctgcaaggaccaatttgatggagtatgggtttcttcctcaaaagaatgaatccggacctatactgaagcccaatttgcttcagtttggaccttcaagaaagcttgagttgattgagtccaagccttcagaatgcttcattgatcgtccttttgaaaggccagcagttacacccagcagctgcgagagtgatatgagattctctttcttccagtctcagtgggacaagtacctggtaaggctgcctgcttgcaaactgacaatgtttattatgttggttaagcacagaataatgttgtactaatactgttgtttgtacttcagactccatatcccaggagtgactgctgcatcatatgtcgatcttgtgaagctgggatgcagcttgtcccctgccttcataagatctgtgttgcctgcatgatgaggtgcaatatcagagcatgtatggtttgtggcacttctgtaagtggagtcaagtcatcccctgcagtggatgcaacatacagatacatggtaatgaatattcttcaaacaattagaattgcttttgacgacctcttgtgaacaaatagtttatatcatttgtagactgtttgaacttttgtttctctatgagttggattggtctgaccagttgatgaatttgcagggactcacggagcgcgctttagatcaaaggtgccagttgatggttgtctgccgtggagctgaggcaatcgtcagatgctcaccatgtatgcacaccatcgcttgccggggatgcttccttgcctcagtgacactactgaagtcctgcaccacctgtggcttcatggttgagcacttcaagatcgtttgacaacacttacctcccgaatacacactagtattactaagcaaactaaggtatagaataaagcaagcagtcctacaacctgaaggagagatctgatgtgctctcgttcggttttgccacacttgtgggatgcgcgaacaggctattttggcagtagtataggcgccctcgctcttgtgagcctgaggtgctgatctcttttgctcccttctgttcttccttagaaacaccttgagagacatgctcgatttgtcttctattgctagttctgcttctgtgagcttgttatggtctggcattggcaagctgtcagtaataacgccatgtaaagcccctcgtctctgttatggcacttctgtcagtaaacctgtgtaagtagtttctaagtactactagcatctaagatggatcttttaagcttcacctctggggttgcggtgcttacaatacactctttataatatgttcctgatgtctaaatctagtatttttgcctctttctg

SEQ ID NO: 4883 - DNA, 2800 bp, Sorghum bicolor
cgcagctgacgccgtctgttggttgtctttccctgctctcgttcggtcgcggcaccgtgatcgaaccgcctaattaaatcgcctggccagcatctgctccctgagctcccttagcttcttctaaggcaagagacctccctcccctaactagaaccagaggaagaagaaacacagctgcttaatatcatgcctgcctccaatcccgtgtcgacgtcgtgtatccatatgtgtcgacatctatcgtggcgcacgtgcgctcaataagaatttggttggcgatcaactgattgttgtgatgcaattggtcggtcttgtttacggcacatgtatgaaacattatatatagataaaaataaaaactagttaattatatagtttaactgtaaatcgcgagatgaattttttaagcttagttactttatgattggacaatatttgccaaataaaaacaaaagtgctagaagatccgaaaataaaaaaaatagaaactaaacaaggcctaatggagttttttttttctggtcccatgaaccgagagcggccgactcgcattataggtaggctaggggagttggattttttttaaggcttacattttcaccgagctagatgcgcatggagacatgcatgacggaaacgtgtcgtgtacatactttcatcgttgatcaacaaccgtgcatgcaactccaaattaaagaggtacacagtgtgagccacctatataaacttgaaccaaactagttgctttgtgtggctagtggcttggcctgtcggaaaaatgcatgcatggtgcgagagatgtggccatgtggggacgacgggaggatagcagatacggtccatcgtccatgcacgctgcaacgatataatcggccgtacgtcccggccagtttcactagagacacggagagcgagagaaattaaaaaacaagggacgtgtttccatgctttttcacgcggatttgtagtacagagagataggcacgaagcaactgagaccttgtttagttccatccaaaaatctaaaatttttcaagattctccgtcacatcgaatctatagacgaatgcatggagtattaaatatagacaaaaataaaaactaattgcacagtttagtcgaaattgacgagacgaatcttttaagcctagttgattcatggttggacaataattactataaacaaacgaaagtgctacagtatcatgaaatttttttcttcagaaactaaataagaccttggtcagccaccacggcccacgtgtcgaactcgcatatcgtcgtcacatacatccaccacaacagcaacaagcagccgaaagaccgaccggccccgcggtgcatgcatggcctgtggactgtgggggacaaggcccaataaaatgaattgctacgaggccggcaaggaaagcgatgccccagcagtcagccgacataacaaaatgcagtcttactgttgaatctatggcccttgcttttgcttattccctctcccatgtatgtatgtacgtaatcacatattcacatgttagcataacaaaactcccatttagattgctacgcactccaatccattcgaaattataaaacgtttgactaccaaatttgaccaatcgtattatccaaaatttatgtaaaatatgacttcttttaacgtgacttattagtttattatcagaatttctttaaaaataatttaaatttaattatgtttacataaatttttttaaataagacaaacttgaagttaaaaagtcttataatttaggatagagagaatagtacatatctagtggtggctatatataaatagcacctcctcccatgcgcctacaaccacacagcaataagcctcccccttcatcgatcaccaattcaccatccatcatcaaaggcagcaacaaaaacctcgcgaagcagggagacgaccacgcattgcaactacctggtggttcttgtggccatttgcttgcttgctagctaccacctgcattgcagatacacacagttacacgcatagagagacagagagagcagagaagaaattcatggagatgtgcttggatgagaagtggaagctatcgagcagctccaagaagggaagccggcggtcggcggcagtggcgccggcggcgacgagcccaagaggcctcaacaagggccggacgacatcatcgagggggcccgccgcccggtctgccgccgttcatggccggctggcgagcctggtgaaggagcagagggcaaggttctacatcgtgcgccgctgcgtcaccatgctcgtgtgctggagggactagctagcgagttcattcgcacgtacttcttcagggcctgtggcccatcaggtgctgctctgcaacggctttggccctggatggccctagcccggccctgtggctaattcttattcaggagagggtgggaggaagaatgaccggatcggagatgtgcctaatcttttgtgtggccgtcctgtatgtatgtgcctgacagacagtgtttttgtacttttatttgtagtgtgtcaaaaatgttagctttgatttgatttgatatctgatctgagtgcagctagcactgctgtaaaacggacaagacttcgttacttactagcagctcatgaaatgagatatattagcccctctcttacacttaattttttccggagaatatatcagttccatgagaatgatattagtagtaaaaaagaacaattccgatccagtataatactgccgatcctatggccggatgaatttaaccgcgccagtgcaaatccatttttgacgttagcaga

SEQ ID NO: 4884 - DNA, 6491 bp, Sorghum bicolor
  misc_feature (6218)..(6491): n is a, c, g, or t
agagttggaggttagcctgttgctggttaaacaccatgtcattttccaggatgatctcttttcagggcaattttccagggtgacagcgacttaaccactcttcctgcctgctgtaatctccaaaacaaccggtcgagaactcgagaacccacaaatatatatatatatacttcctctctctttttatatacgttctcacttcttgagaagttaaacatacttatctttgacaaaatatataaaataaaatattagtacttatattacataattaatatcttagatagattatatttacataataaatttctctggagatataaatatttttaatattcttttataaattcagttaaatttaagaaatttgatcggcacgattcctactatgatacctaaagacaaattcagcttcaagaaattaaacatgcagaacgcgaccaagaagctgctttaggccttgtttagttccaaaaacttttgcaaaataggaatagtagcactttcgtttgtatttgacaaatattgttcaattatgaattaactaggcttaaaagattcgtctcgcaaattatagataaactgtgcaattagttatttattttatctatatttagtacttcgtgtatgtgccgcaaaattcgatgtgatagaaaatctgaaaatttttgtaaaatattttgggaactaaacaaaggccttagccagcggcatcaggattgcgtgccaaaagcaagaaaagagatgtatactgtgcaacctgaatggtttgcattttgccactgatcttatcctctcccttgtaacttctctttatatattttttaataaaaaagtcacttcacaagaagttgccaaaataaagaaaggctgcatccagtgagtggccttttgtgtgtgcaatgcatgcatggaagtatttttgtttttgtttttgtttaaaggagatgactgtaccctgcctagactaaaatatagtgcaagttagtgatttggtactctgcgtacatgtcatgtgaatatgtgatataatactccaacttgtgcttttggtgattgcacgggaaattttcagatacggcttccctgtagcgtgaggcccgctctatttatatatgttattattatgcaacttatactagtactagtacaaaaaaaaggttaggattttggcttgtcatacatttagataatattacttggactggatgaaacaaattaacatgcacatgtgacagggctagtggaactagttgaaccgggtgctgccttttccattggtgattttcaaattgcagtggcatgtcacgtacacgtcattatctccgttataagagtaattcgttctattttatttaaaaaaacaaccggtgcatagtcctttctattccattccattaagatattaacatggtcttacctataaaaattaactaatttatctgagcgtagctcttatgaaagacaaatctagcccctagtatatatgcacataggttttgtgttgccaattcatatattaactttgatgcccaaggttaatgttgaaggtgtttgaccaacagtgatcctaactaactgcactcatactaggcagtaacaaaaaaaacctgcaaaattcaaacagctaacgataggccggataacttttcactttccaatttctagcatctaatcaaactaaacactagggcttctctgaagttgatactcatatgattagcaatacaatcatatgctctccgtagtagaccacattatctccttagtatattcattcacattcacacactgatctgatggcctctttttgttctcacatcaaaccggttgcaaatccaaaagcagcacacacacacaaaaaaaaagaaagaatatgataaaagaaaaaggaccaatttgaccacatcacgtggggcccacacagccccgtctctctctcctcactcatcactcttcttcagtcagagccatcacggcatcctccccccctcttctccccctctctctttctagccgtgctccttttctctctcctcgggaggcttctccctcctcctcctccctccccctcatccccattgcctgtgggctatataggcgggattcattggattggaaagggagctcccggcgagtttgaacccaaccaaaacccgcacctttctttctcgcctcgctcgtcctctcgcgcttcccgccgcccgcccgcccaccggccgccgacgctgcgtctacgagtctggaaccaaatgccgcgagatctgcgcgcgtgacgccgtccaccgccggagcctccctccgagctccggggccacggagcgcttcgtcccggatctctctggtggctcagtcaggtgagcaagctcttgcaactgggctggagctctatcctggctcagcttccacagcttcagtcttctttgctcctcgatcggttgggaatcggaatggtgggatagatgcctctctggtcagtgcaatgtcgctcgagtggcttaggtgtgtgttcttggagttggtgactctgctttgctcctcgcccctcctccaaaaaagaagatttcgattttgggttgcttggattcggggatcatacattctgaacatttcttgttgctgcatattggagttggcatttcggattcagtcaatcaaatcaactcccgctgctagaatatttcagcgaagggttggtggtaggagctggggggactgattttctcccatccccctcaatcacgaacgcactcccgacgccgacatctcggctcgcagctcattcttttctagccccctcctttggttttcagaagcggttttaggggttgtcggcaggttttgtcaccgagcgctttggcgtccgtaatttcaggccgcttgtcctttcttgcatttttctccttttctttcatgtggcctcacgttttcgaaacccacaccttttccattttattttccccgcggagtagtttttttttactcaaattgtaccggaaccaaggtttaatggatgcggttgcttatcttctcaggatagctactcttgactctttgagataggcatgtgctgacattagacttgtggggagtagtacttgattgcacttgttagttcagcttcaccaaattctcaacagcatgtttattcttctccaggacagtagatagaaggaaaaggaaataagcttgctgtgtgtgagctgctgcagactccaagaagatggatcagtatgaggtgttggagcagattggcaaaggagcatttggttctgcgcttttggtgaggcacaaggtcgagaagaagaagtgaggctaacctgctctgtttttcatctataatacgggctaagctgttcttgttcagtaatttttaccgcgcgggagtctatctcgcaggtatgtgctcaagaagatacgcctcgcacggcaaaccgaccgcacacgccggtctgcccaccaggaggttagcatcttcttcagcttcatctatgctacctttttccgcatttggtacataggcaggattcctaggaatgaaatgccctttttcaccatgcttggcttttgatgtcactctccttggtacagaatgattagtggtgctaatagttaatagttgctggacaaatcactgtatccataccatcataatgatgatggtgtgcctagtttagcaagtcatgaactgatctgatatgagttgtgtggaaattttcttgcagatgcagctcatcgcgacagtccggaatccattcattgtggagtacaaagattcatgggtggaaaaggtaggcaactgggccaaataaagttctgctttaaataattgggtgaaaaccttttcttgttatgtgtctcattcacttctcaaatttcagggttgctacgtttgcattgttattggttactgtgagggaggagacatgtatgtatttcttggaggttaaatagtttgttcacaaacctttctttacttcatagctaagctaacacaacctgtactggttcagggctgaggctatcaaaagagccaatggaaaccatttttctgaggaggtgcagttcttgaccttgtttccattcttgcgttctgttgctctgctgcaaccaaaggattcacccttcactttcttttttttttaatttctagaaactttgcaagtggcttgtgcaacttctcatggctcttgattatctgcatgctaatcacattcttcatcgagatgtgaaggtcagtaatagtgctttattgatgatttggagtacatgatgatattccccctcttcctaaagcatgtaattaacaccaactgaaacttctcgatatgtttcagtgctccaatatatttattgccagagatcaaagcatacgccttggtaagtgacttaaactcaagaaaagtacagtactttatgtatgaattcagtgaccccggtgatgattgattcattctaaatctgtacaaatgcaggtgactttggtcttgcaaagatattgacttcagatgatcttgcgtcttctgtaagtatacttgaaactttttaagttttcttgcatttatttgatggtgttgcttattactgtatttgctccaacaaaggtggtaggaacaccaagttatatgtgcccagaacttcttgctgatataccatatggcactaaatctgatatttggtctctaggtatgtattacttcagtgtcataaactatgcttctgcacttagataatacaagcttgtgatctaatacttgaatttttcttttacaggatgttgtatttatgaaatgactgctctcaggcctgcgtttaaagcttttgtaagtccttggcttactttctttttggagattgtatgtaattagtttttatgttggtgcaatttaatggttaagctaaaagcgtcattcatactttatacttaacactccatgtgcttaagtgttagatgattatcttccttattttcagatgtttatgccatttacattagtaaattaggaattcttatggatgtattgctcttgctagacacccactgcattgtgtgtatgctgacacttagtcattttaaatattcataattacaaatataactggattactatctcagtcctaataatcatgcaactctatgatttcttggcaggacatgcaagctcttattagcaagatcacaaagtcgatagtatcgccattgcccacgagatattctggttccttgtaagattgttattgaattatactcccttttatttacatcttgtccatcatcttacctgaatatgtttctgaaatattttgcttcatgcagtaggggacttatcaagagcatgctacggaaaagtccagaacaccgaccaagtgtaattcctcagtgttttttaactgatgcactatttatgcttatgtagatttgtttactcataaaaaaacatttcgcataactggtgtatgcaggctgcagaactgctaaagcatccacatcttcagccttatgtgcttcaggtccagttaaagtccagtccttctcgcaacatgtctccaatctatcaagctctgacagacaaagttaagaagatgacatttcctggtgatataactgattctgtgagaagaagggtggcaagaaggaactctctggggaatgagaggactgtaacattctgcaaaccctctcctgagcggaactctattagctctacacggagcatcaaagaatatacaactacccagagtgtcaaagagctatctgttgacagcagtcaaattgatgacgaggtcacaagtaaagccattataacaaagacatcgggcattctaaggactcccaagagtactccagccaagacattgacaactagaaatcggttggatcctccaaaaacatcatataccagaacaaaccatgctgaggtatttacacgagcttattctatgtccgtgcttttgttaatactggcaaacatgtgctctcaatttgtttgaaaatcttccatgattctcggttacaagatgcacatgcccgtactgctttgatgttaatcttaattcacttatcttttagtttagctttggtggtcctcacagttaaatattccccaaaagcttagcataagtcccccatcatgatgcatttgtttagcaggtataacattatgctggtttttggttgcatcacgagtttgcctttacgtgaccatgttacctatttnnnnnnnnnnnnnnnnnnnnnnnnnnnnnnnnnnnnnnnnnnnnnnnnnnnnnnnnnnnnnnnnnnnnnnnnnnnnnnnnnnnnnnnnnnnnnnnnnnnnnnnnnnnnnnnnnnnnnnnnnnnnnnnnnnnnnnnnnnnnnnnnnnnnnnnnnnnnnnnnnnnnnnnnnnnnnnnnnnnnnnnnnnnnnnnnnnnnnnnnnnnnnnnnnnnnnnnnnnnnnnnnnnnnnnnnnnnnnnnnnnnnnnnnnnnnnnnnnnnnnnnnnnnnnnnnnn

SEQ ID NO: 4885 - DNA, 6281 bp, Sorghum bicolor
  misc_feature (1)..(1998): n is a, c, g, or t
  misc_feature (2368)..(2467): n is a, c, g, or t
nnnnnnnnnnnnnnnnnnnnnnnnnnnnnnnnnnnnnnnnnnnnnnnnnnnnnnnnnnnnnnnnnnnnnnnnnnnnnnnnnnnnnnnnnnnnnnnnnnnnnnnnnnnnnnnnnnnnnnnnnnnnnnnnnnnnnnnnnnnnnnnnnnnnnnnnnnnnnnnnnnnnnnnnnnnnnnnnnnnnnnnnnnnnnnnnnnnnnnnnnnnnnnnnnnnnnnnnnnnnnnnnnnnnnnnnnnnnnnnnnnnnnnnnnnnnnnnnnnnnnnnnnnnnnnnnnnnnnnnnnnnnnnnnnnnnnnnnnnnnnnnnnnnnnnnnnnnnnnnnnnnnnnnnnnnnnnnnnnnnnnnnnnnnnnnnnnnnnnnnnnnnnnnnnnnnnnnnnnnnnnnnnnnnnnnnnnnnnnnnnnnnnnnnnnnnnnnnnnnnnnnnnnnnnnnnnnnnnnnnnnnnnnnnnnnnnnnnnnnnnnnnnnnnnnnnnnnnnnnnnnnnnnnnnnnnnnnnnnnnnnnnnnnnnnnnnnnnnnnnnnnnnnnnnnnnnnnnnnnnnnnnnnnnnnnnnnnnnnnnnnnnnnnnnnnnnnnnnnnnnnnnnnnnnnnnnnnnnnnnnnnnnnnnnnnnnnnnnnnnnnnnnnnnnnnnnnnnnnnnnnnnnnnnnnnnnnnnnnnnnnnnnnnnnnnnnnnnnnnnnnnnnnnnnnnnnnnnnnnnnnnnnnnnnnnnnnnnnnnnnnnnnnnnnnnnnnnnnnnnnnnnnnnnnnnnnnnnnnnnnnnnnnnnnnnnnnnnnnnnnnnnnnnnnnnnnnnnnnnnnnnnnnnnnnnnnnnnnnnnnnnnnnnnnnnnnnnnnnnnnnnnnnnnnnnnnnnnnnnnnnnnnnnnnnnnnnnnnnnnnnnnnnnnnnnnnnnnnnnnnnnnnnnnnnnnnnnnnnnnnnnnnnnnnnnnnnnnnnnnnnnnnnnnnnnnnnnnnnnnnnnnnnnnnnnnnnnnnnnnnnnnnnnnnnnnnnnnnnnnnnnnnnnnnnnnnnnnnnnnnnnnnnnnnnnnnnnnnnnnnnnnnnnnnnnnnnnnnnnnnnnnnnnnnnnnnnnnnnnnnnnnnnnnnnnnnnnnnnnnnnnnnnnnnnnnnnnnnnnnnnnnnnnnnnnnnnnnnnnnnnnnnnnnnnnnnnnnnnnnnnnnnnnnnnnnnnnnnnnnnnnnnnnnnnnnnnnnnnnnnnnnnnnnnnnnnnnnnnnnnnnnnnnnnnnnnnnnnnnnnnnnnnnnnnnnnnnnnnnnnnnnnnnnnnnnnnnnnnnnnnnnnnnnnnnnnnnnnnnnnnnnnnnnnnnnnnnnnnnnnnnnnnnnnnnnnnnnnnnnnnnnnnnnnnnnnnnnnnnnnnnnnnnnnnnnnnnnnnnnnnnnnnnnnnnnnnnnnnnnnnnnnnnnnnnnnnnnnnnnnnnnnnnnnnnnnnnnnnnnnnnnnnnnnnnnnnnnnnnnnnnnnnnnnnnnnnnnnnnnnnnnnnnnnnnnnnnnnnnnnnnnnnnnnnnnnnnnnnnnnnnnnnnnnnnnnnnnnnnnnnnnnnnnnnnnnnnnnnnnnnnnnnnnnnnnnnnnnnnnnnnnnnnnnnnnnnnnnnnnnnnnnnnnnnnnnnnnnnnnnnnnnnnnnnnnnnnnnnnnnnnnnnnnnnnnnnnnnnnnnnnnnnnnnnnnnnnnnnnnnnnnnnnnnnnnnnnnnnnnnnnnnnnnnnnnnnnnnnnnnnnnnnnnnnnnnnnnnnnnnnnnnnnnnnnnnnnnnnnnnnnnnnnnnnnnnnnnnnnnnnnnnnnnnnnnnnnnnnnnnnnnnnnnnnnnnnnnnnnnnnnnnnnnnnnnnnnnnnnnnnnnnnnnnnnnnnnnnnnnnnnnnnnnnnnnnnnnnnnnnnnnnnnnnnnnnnnnnnnnnnnnnnnnnnnnnnnnnnnnnnnnnnnnnnnnnnnnnnnnnnnnnnnnnnnnnnnnnnnnnnnnnnnnnnnnnnnnnnnnnnnnnnnnnnnnnnnnnngcctactccgctctccccgaaagaatccataagctccccaaccccctcctccattcctccaaatcgaagcctagcctagccaagcacgccgcgcagccgccgccagtagcagcaggaggagcaggggcagggacaggggcgagacgagatggtggggacggcagccggcgccgcggagggtgcggtgcggcggtgggtggatgccgccggcgggcgcctggtcctggacggcgggctggccacggagctcgaggccaacggcgccgacctcaacgacccgctctggagcgccaagtgcctcctctcctccccgcacctcatccgcaaggttagccaccccccgaccccgcaaacaccccccccccccccnnnnnnnnnnnnnnnnnnnnnnnnnnnnnnnnnnnnnnnnnnnnnnnnnnnnnnnnnnnnnnnnnnnnnnnnnnnnnnnnnnnnnnnnnnnnnnnnnnnngttggaagtcgggtgatttccggcgatctgttggatctccgccctctgttctccagccagggagaacccaaacctgcgccacgcggtgatgcggccgtgctgcaaacatttaaccttttttttttccttttgtttcttctatattcggaacaattaacaagtgacgagacgagattttgacatgggtttgggatcgacgcgtcactgctcgttattactggagtagtttgtttgttgcaaggtagtagtggggatgctttcttttattgttttcatcatggtccaagggtattggaaggacatatcgttgcaacaaaagaatatttgggaacgtccgtccccacagcaagttgctggtaccacatcgtgaacaggacagtagcatatgggtatgttatagagatttgaataaaagcccttgcttgctgccgaattggctcatgcgtctatgctagtgactgaatttggtgatcgttcatgaactttgtgctagttgattctttggggaaaaaaaaaatccgcgagtgattttgaccttgccctggacccagagcagggcgcatcctgtgcgtgtgtcctcattggtcttatccagacccagtcacccagacttatcctcaagaatcttatgccgtagtcaggacctcaactgagtccttcactatggaattcaggatcagagctcattttctgacccaactcattatggaggctggacatggacatccggggaaaggtgtttatgtgaattatttccgaagatagttctgggctaatatgtgtaaacttctatgttaacagtgaactgaactgaatagcaattttctgatttgaactcatgattgtctgttcaaatcctgtctttgttctgcctgcagttacctaagcaacaacttacatactttttttgcattttgattttgatttaaataaataattcttgtttcattggcacacagtcgttttcagattgccatggcacattaataaacctttatgtatttggtgaacaggtccatatggactacctggaagctggtgcaaacattctaatcacggcatcgtatcaggttccatgctttaaacactcaacttttcagtttcatgtgatgtccatttgtcaatgatactgactgtcatcttgggtactgcaggccactattcaagggtttgaatcaaagggcttttcaaaagagcaaagtgaaaacttgttaacaaagagtgttgagattgcactggaagctcgtgagatgttcttgaaggaacatttggagaaatccattcctatacagcatcctattctggttgcagcatctatagggagttatggggcttatcttgctgatggctctgagtacaggtatttataacaacttaatgacagagtcacagattatgttttcacatacttatgccagacactcacttttgttttgctgtaaatagtggggattatggtgaagctggtacaaaagagttcctgaaagattttcatcggcggaggcttcaggttcttgctgaagcaggccctgatttgattgcttttgaaacaatccccaataaactggaagctcaggtctactattttgcaatctgaatcttttgccttgcatttttgcccattcttatgaaatagtctctgattgtttgctatttgtcttttaggcatatgttgaactccttgaggaatgtaacataaatatccctgcatggctttccttcaactcaaaagatggagtgcatattgtgagtggggactcagtaattgaatgcactactattgctgacaagtgtgcaaaggttggtgcagttgggataaattgtacacctccaagatttattcatggactgatactctccattcgaaaggtatccccagtatccactacatcttttgtccttcaattacaaatggactgatactcttatcatgatttccattcttgttctcccgtggcacaaatcactgtgttgaggaggctgcagttctgttttatctaacttaactttgttgcgttaccacaggtcacggacaagcctattctgatatatcccaacagtggtgaaagatatgatggtgaaaaaaaggagtgggtggtaagttcattaagcaaagttaagcttattcgtataatatctaactatgttctttggaacatgaaaaaagaaggaattacctagttttatatctttcatagtttttgtgcatgtgatttgggggttctgaaaccaccaaatataaataaaaaaaatataaatgcatgcaatgtacttcgctgaaatttggcttatgctgatttattgtgagagaaaaacattgttcgttcaccaaaaagtactgccaaagtagtgctgcagaacagggtgattgtggtctctcctttttccacgaacaacatgactattcagtcttgcatctgtggaagcatgataaaggggagatgtgttctcttgttttggttttcttccgaatgaatacttatgcatagccaacaatgtccatttttattttatcctcttcagcacttttccttgttaaatacaagccatacctttagaatttcgaaattaaatatagtatgtgacgataaacctgagatggtctaagctctggaagcttcatattctgtgcaggaatccactggtgtatcagatggtgattttgtttcttatgtaaatgaatggtgcaaagatggggctgcgctcatcgggggctgctgcaggacaactccaaacactatcagggccatacaaagaactctaaaccaaggcttcaactagcagcacttacctgtagcgtagagctgtgctctactcctgatgagctcctcctagcagtaccttgaactatatacctgagattccttaaccagtgaaccaatataatgttgcattttcgcttgcaaatgagatgtgctgcacctatgtttgtaaataatgttgtatttctgggttctaagatatccaacttggaggtacaaccggtgaagggtgaggaagcagcaacaatgatagagttctactactgaggaaaaactacttgcggctgagttaatgaagcttagtaggtaccactattaagcgtttaaagagtttgtatgaccgttgctctggagatgttatcttcaataagtgcttatgttactgctagttccatatgtaagttatgtttgataaacctgcatctcctgaaacgaagatcttattacttatgttactgttagtgtgagctgtgtttgtaaattttgtttgacaaacctgaatctcctgaaacgaagatcttattactcccttaccaatcaaaagttcgttttacataaagtatgcaatttgatgccaaatacagccccatatccttggatgaattgttacatcaactgctttcttctgcatacgtttcgcccctttgataaaaaactatgcaagaaagaggcattcgtttcgtcgcttcgacatatatgcaagaaagagccatacaaaaattcatatggccagttattaaacagaaaacggcgactattagacaaacactgattatacgacatctaacaaatggctaacatgttacctgttcacaacaggtgcagaggtagctaacctggattttcacgccagtgaaaataacataaagtaggaaaaataaaatagcgttaaacagtacttccatcatccgaaacaagagtatccatgagcaacatggctaattgtaacccaaacagtctgccacccgaaaaagaaaaagaaaaactccagaataagatgacacttggagagctcaagtatggtcaactggactgacagtagaccgtgaaaa

SEQ ID NO: 4886 - DNA, 5714 bp, Sorghum bicolor
ttcccaggaggtaatgtgtgaaattatatttatttaatttttaattttggaaaaaatacaataaataaggaaggttttagatataaatatctttttttaatctagtacatgcatatgagatccgcaaatctttttattgttgtaattttagatatgacataatttaattagcatacactatataatagttttatacaagtaacacaatgttgtatgtaggttccaaacatactggaaacgcatatgtgttcaaacatatataaaaccctatgttcctacaagaaatttcatatagccactttacatgctcaataatatatgtgataactgcatattttattacaaaagcctctaaattatgtaacacaattttaatcaagttagcataatatacacactagattatgtagcatgttaacgtgcaatgtattttaacatgatttagaatcataaaaaaatagccatcttttagggtatttagtggaatactcattgcttttgctaaaaaattttgtacatagaacatatatgtacatatatacattagaaaaaaaatgaaacaaaaatagtagggaattcacgttaagcccaaaagaggccatgcacaagggaaggaaagggcatgctccagattctctcccttgatttgaggatttggcaacatttttttcttttctaagttgattaattcattaactaattaaaaaagaaattaaagaatcaatgactcacatttatttcaggtattacctaagactatctccaacaatggtcacccaaattacaagacctatttgttctttgggtagcgctacaggtaaaaggttccatacctatttttagtcttctccaacaacaagacctaaaagacaacactctctgcaaatgggtctcgaggagagaggatacctaaatttaggttatgcctctcctgatacccaaaatagatcttctgtatgggtactctgttagagactataggtattgtgttggaaacctatttttagtttgggttcccaaataggtctcctattggaagcataaaccgtatcattgcccctttttaaatgttcatgctctcgcaattggcgtaccaaccaatacatatcgtggattggcacaggagaatacttttttttagtacagcagagaggtatccattaatgattgcgcactgtttgcggcacatgttgtgacgtgagggagcaactccctgaaaattttgcaaaatttttcagatttcccgtcacatcaaatctttagacacatacatggagtattaaatatagacgaaaataaaaactaattgcacagtttggtcgaaattgatgagatgaatcttttgagcctagttagtttatgattggacaatatttgtcaaatacaaacgaaagtgctactattcctattttgcaaatttttttgaaactaaacaaggcctatggcctatttagttctaaaaaatttaacaaaatgaatattgtagtaattttgtttatatttgataaatattatttaattatagattaactaggtccaaaagattcgtctcgcaaattatagttaaactgtataattagttatttgttatatatatatatataatactcgatacatgtgccgcaagattcgatgtaacggaaaatctgaaaaagtttataaaattttttagaactaaaataggtcttgtttagatccattttttttagattttaacattgtggcattttcgtttttatttgacaataatcatggagtaactagacttaaaagatttatctcacgatttacagacaaactgtgcaattagtttttatttatatttatatttaatgctccatgtgtcgcaatattcgatatgacggaaaatcttaaaaaaaatttggttttttgatgaactaaacaaggcctgtgtagctagaaaaaaaaaaatgctcccaaaacaaccgacagttgtttagcaattctcattataaatacacacgcaacagatccacaccgtgcattcagctgaacacacacaagtactccactacaacaagtctacaacccccactctctctctcagctagctagctagctagagagtatctgtactgtacgtaccgcgtaccagtcgacgatgatgccctatggcacggcggcgggggcggaggcggcgctggggcgttccatgagctgggcggaggccctgtggttccggtactcggcggcgatgccggagctgtggctcacgtcgcacatcgctctcgtctaccttgtcatgtacgcggtggcgccgctgcccgtcatggttctccagcagctcgcgccggcctacgcactgcggcacaagctgcagcccggggtgccgcagccctcgccggtttctgtctacctaagctacataagcgaaagcaagggtctcaccctgtccgtcttgggccctttcccacttatctactccgctgcattcaaggtcggtctggtctctctccgcatctgtctatccatgttaagttgagtgtttggaccaatgttctctgatcatttgattaattgcagttaattgcgattaatcatccttatcggtatttagcatttgattagggtcttcgactcgatccgagtgatcagaaacctgatcgtctgcttaatcgtcgattaattatgcatgattaatcgtccgatcaagtcacttgaccgatcagagctaattagcagattgactgcttttggtctgtgctacatttatttgggccaagctcgttagggtttctcttatatacctcacccccactctctctccttagtcctcgctcccaactccaaccttcatctgctgagcttgttgctcgtacatctgctgagttgttgagcctcttctctcccttccagttccaatccaagcagtcccctactgcctactgcttcctcctccctctttcctactgcaactgcaagtctacaactacatacatatatgatatatagtgttactatatgctggacgattatatagacgattagttcgatcagaggtcgattaatcgtcctaatcgtcgattgatcgtcctgatcgataccagaccggttagaaacgataagtcaatcagaaaacactggtttggacacatgcataaagtactaaatatagactatttatatgaaactaaaaacacaccctgttaacatgttgatcatccgtgacagagtagagaaacatagcttatgtgctaacttggacttcaaaattactccctccatccccccccccccccaaaaaaaacttgattttttagttttgtcatgagtcaccaaatttatacataaatttgttaacatttatgacaccaaataggtatgtcataatatgttgcatggcaaatctaacaatacttatttggtagtaataagaatattagtattctagtgtacacatttgttcaaaattgctgttagtggtgaataaagtgaagacaccgtgcttgccactgtcgttaattctgagacaaattataaggtttgaattgatatcctcaagaataaattaaaccatgataaaagttatactgaaattaaaccaaaagcttagtaactaactaactactagctagcatgtgactgaattagttgatgcaattatttccagaaaagaggtgacctctacttaattagcttgatctttcttacgatcgtaatgtatacattgttgtatatatagttgtttggggtccggacggggctccctttgccgtccgtatgggagacagcgatgcacctggtggtgtactcgttggtggaggactacctgtcctactggctccaccgcttcctgcacaccaagtggggctacgagaagatccactcggcccaccacgagaagacggcgccgtccgggttcgccgggtcctatgccaccggcaccgacctcaccttgtacaccatcacgctcttctttgggccagcgatcgtgccaagccacgtcaccacacactggctctggttctccatccgcataatggaagccttcgacgcacactgcgggtaaataactgattatatatatcatctatttctattctgtttattagttcgaagaagaggcgaagaagctccgtcaaaatatatatatagttttagttcgaaaagtctaaaaattttagactatatgcaccctttttgctcgaagtcccatgcactcacaagaaagatgcacccccctttaatttagatagcttcaccactggttcgaagtccgtgtgtgtgcgtgcgtgtgttcagagtttagtgtctccaatgaatttattactgactctaaatgtagttacgacttcccatttagcctcgcaaggttcatcccatttttcggtggcgcagagttccatgactatcatcactatgccggaaagaaaaccaagagcaattttagttctgtgtttagatattgtgattatatatatgggacaaacaaagtaagtttgttgtttcttgtgcaacatgtgtacgtgcataatatgtgcctctctccctcttctccgactagctagcttattggtcatttcctcttctttccttttcagggctacatgtaccacaagagaagcctagccaaggtagcttcaaactttagccaccttcttagatttcatctaaaaattagtacaaatctaactctgtttgtttcttcgataaatttaacccctcccatttccaattaatttgaatttttgcacaaaaaattacttatcagttaccactttattaaaaattgaaaaatgttgccatgcgggtatacgtacgttgtgcctcacatgtgtcaccagatacatgcctcttacttttgtactttgcacgcagctgaagatgaaggaggtcaaacacaacatgaagggcagcagcgggaaagaggattgagattaattaacattttattcttgaataagttgaacggtgaacatatacccatcatatacaatttgttggtttcattgcctagagatcagatatccaacaaataatccatatttatcaccacaaggtttctcaatatatatatgtagtcttagggctagtttggttgcactccagtccacctcaatccatattgtttggtagggattgtagtggatttaagttcatccgaacaagtccttacatgaatgtacatgtgtaatctgtatgtccactagctaagagaatatatcaaaggtttgctaataattatagatttctagtgaaaatatttttttgtttgctactcatactacacgagggatcatgcttggtggcggttgtggcggtaaaacaccagcgccgccactcctccacatccttgtacgatctctctttcaccgacatctgagccactaaccactaagccaatgtaactatgttaacgatggcaatgatgatggtagcggggtgttttattcttctccagttggcacggaggacactggttggctcaaattggttagatatggcatctctttgctcaagcgagcctcctactcatcggatctaatctctatgctcatgaatcttgtcttctcctctttggttttggttgaggagacacaacaggtgtaggatgtatgaaggtgatgtccatgggtaagatgtggtctcctttcacactcgactcaatttggaatttggcttgtggtggtccatgtgcatgttatgagataaatgtagatgatttagtctgaccttgggttgttaagggtggg

SEQ ID NO: 4887 - DNA, 5369 bp, Sorghum bicolor
ccgtaagcatcataccacacacaaattaatagcaataaccaggccaaagctccccgatctcacgccatcgcagatccgcaccgaccccgtgatgataaaataaacaggctaaacacaccgcaacccgacggtaaagtcccacaaggttagggaggaggcgaggcggcacctgtagttagggtttagctcgggcgggacggagagggactgggagcagacggagcagggcgggtcggggggctggatcaggcaccgcgcgttcgggaccgcgctcgagcaccccgtgcccaggaacaccagcgacgacgaagcgggagggggcgcgtcgtcgccgccggcggtgtggccgttggggatggcagcggccattgggtttgccggagcgagaccgcgagcgaccgtggcgaggcggaggatgtgaagcctgcggcacggagtacaatacgacgacgggatttgcacacaggcacgtgcaaaataaagctatttctagtcctgtgattttacatttgtgatctgtgatatacttcgtcagtttcagagaaaaatgtaatgtaattgtattataggtttaaaataaggtaagtcgaatttttatgaagtttaattaaactaatatcaaatagtattaatatttatatttcaaatagatttactgtgaaaatatatttatataaataacctgatgatacttattaagcgtcataaacctttgtacttttgtataaattttgatcaaatttaaatttgttggattgttcggtaggtgagaatgaatttttttattaggagtattaccatgtacttaggctaagcacgtgcagaattttggactctctaacatcaaatattgctcattcacaggtgcatatctaccaaaaaaattatgtatcttaatgtataagcagtggttggaaattggaataatgcttcttacaaagaaatatgacttcgcgtcaaaggagtcaatgtgaataggtagaggaagtggagactaatcatatataaaatgtttatttatatgtccaatgtatgctctcattcttttcgtactggtgagtagaagaactgagatcaaagttatcatgtattgtacttaaagataaaagaaggggttaagataataagcaatgaatcaaaaggaagcacttgataggacacaaaattagacaattcttttataggggtggaggtcaaaagaggatgaggtaatggactaaagatgtgctaatgaattaggatatgtttcttccttgacatacagaaggagaagacaggctcaacaacatcccaacaccaacagtggtacagtcagctaagagaaatctactccttattacccttataattgtataccactgcatctctcacaattaacggatcctatgaacagtacacccgttaaatagaacagtgacggatcctatgaacagtacacccgttaagtacaactctaacggtttggatccagcgaacagtgtaaccgttatcctccagtgaacagtacacccgttatgctaaatagtaacggattcaattaatagtgcgtacccgttatgtttaacagtaatggatccaatgaacagtacacaccgttagtattttctaatggatcctaacccgtgcaactgcacggggatcctggctagtatctactcaatctagaagaaagagaaataaagaattcatctctctagcgcgtacgtttcttaaaaaaatcactcgttgacatattttaccactatctattattattattattattatttaattgttccaaagaggttgttgggtacgccctaaatatgtaatttcgaaatttcttacaaccaatggacatttcagcaaaattgacctgacccgcagctgcttctggcttctgctacccaactgactccgaccgtggcggaggccaccggcggcatcagcctgccattgccgactactcacagaatcacatattccccggcgctggcctctcgcatgcacgagcacacgccatgctcaggcacctaaccaaaaacccattgctcccgctccgatgccgccgcctcctccatcccaaccggctctgtgccaccgccacatcgtcggcggccgccggtgagatcacgccgtttcccgccgcaaacgagactcccctcgaagatgacctcgcggaggagttgcgcagccgcctcgtgcgcgacacctgcaggctgctcgagctccgggactcgtggagcgccaagctggaggcgcagctccggcacctcctccgcgcgatgaccccgtcgcaggtccgcgccgtgctgcgcgcgcaggcgcagcgggacgctcgcgccgcgttcgagttcttccgctgggctgaccgccagtggaagtaccgccacgccccggaggtgttcgacgaaatgctggtgctcctcagccgcaccaggctccacgacccggcgcgccgcgtcatgcgcctcatgatccggcgtggcatgccccggggcacgcggcagttcgcgcacctcatgctctcgtacagtcgcgctgggaagctccgctccgccatgcgcgtgctccagctcatgcagaaggatgggtgtgcgcctgacatatgtatatgcaacatggcggtgaatgtgcttgttgtggccggacgcatcgacaaggcactcgagtttgctgaaaggatgcgtcgtgttggggttgacccggacgtggtcacgtacaattgcctaatcaagggattgtgcggagctcgtcgtatcgttgatgcactggagatgatcagctcaatgctgcaaaatgggtgcctgccagataagattagctactttacagtgatgagcttcttgtgcaaggagaagagggtggcagatgtgcagaatttgcttgagaggatgagtgatgcaggtatatttccagatcaggtcacgtataacatgcttattcatggtcttgcaaagcatggtcatgcagacgaggcattgagtttcttgagggagtcagaggggaaaagattccgtgttgacgaggtcggctatagtgcgactgtgcattcattttgcttgaatggtaggatggcagaggcaaaggaaattataggcgagatgatttcaaaggggtgccgccctgatgttgtaacatatagtgcggttgtagatggattctgccggattggggaactcgatcaggcaagaaagatgatgaagcatatgtataagaatggttgcaagcccaatacagtcacgcatactgcactgttaaatgggctttgcaaagttgggaaatcttcagaagcatgggaattgctaaacaagagcgaagaagagtggtggactccaagtgctatcacatacagtgttgttatgcatggatttcggagggaagggaagttaaaggaatcatgtgatgttgtaatgcagatgttgcagaagggtttcttccccacaacagtggagattaacttgttgattcacgcattatgcaatgaacgaaaaccagcagatgccaaagacttcatggagcagtgccaaagcaagggctgcttcattaatgttgttaacttcactactgtaattcatggattttctaggcagggtgatctggaatcagcactatctttgctggacgacatgtatctgaccaacaggcatcctgatgttgttacatacactgttgttgttgatgctttaggaaggaaaggtaaaatgaaagaagcaacatcacttgtagagaaaatgcttaatagaggtttgcaccctacacctgtcacatacaggactgtgatacatagatattgtgaaaagggtgcagttgaagatttactcaatcttctggataagatgttagcaaaagaagggtttagtagtgcatataatcaggtcattgagaagctatgtgcatttggtaaacttagtgaggctaacaatctcctcagcaaggtactaagaactgcctcaaaaagagatgctcaaacatgccacattttgatggatagttttctgaatagaggactcccacttcaatcatataatgtggcctgccgcatgttccagagaaacttaattcctgatcttaaattatgtcaaaaggttgacagtcagttggccctagcgggtgagaaacaagctgctggaaagcttatcattaagtttgttgaaagaggtattccagaacaagaaaaacaagattactaatttgtatcatagtcctctggtattacctgtctttattgagaggacagttgagctttagtgaacaatccattgcatcctaatcaaggaaattatatggttttgtaccttatatggagactcaagccgagggtacatctcatgagtcttaaatgtacagtaacatatcatcagctcttactggacctgaaaatgtatgcagcctggtgccactttcagtttggtgactggtgagaattagctatgatgttttttctttgagctgtagctttgaatcgttaattgaaaagttagagcataatcagttttttattgatatctcctatttttatttgagaggcagagagagatggagagagaatgataggggatatctgcactagaaattgacagtttctgtgctcataaatcttgttcgttcagtctgttggtgcatgaatacatccatattctattgactggaggatagctctattttttgtgcttcccgccttccccactgacaccgttcttcttgcccctgtacagcctccaatttgctgtgaaatttggcttgggtctatacatctactgaggatggatccttgcagtgtattcatgctccaaatcttgcttgttttatttctttgcaggcgtgaacatgcataatggtgaggaggtgactgtgaacctggtttacgacaaaacaacttctgcatgattttagtgtcaaccaatatcaaggtgaccagttctaagttgggagttaattccagctggagtaattggaatctgtgattagatggaaaactggagtaatatccttgctgcatattaggagttgggaaaactggagtagtagccttgtttcatattagaaactgggaaaattactacacaaattttcctgtatagaaaggttagttaggtgttctgttctaaaattgagggggtattctgataaaaataggaagcaaattctgaggcacaaaagcattggtaaacgttgctatggttcattttttctgttaaatcttttttattgtttgattcatgccaatttcatgtaatcctggacctggagatccagaaacaacttgattcaaggttgaacttcttgtggggtagaaaagcaaaagcaaggccattagaataatatgtatataatacacacatgttactttatcatttcaacatcacatttatggtttcctgatgact

SEQ ID NO: 4888 - DNA, 7871 bp, Sorghum bicolor
tcattatggaacctcgagcagctaatttaagttctacatccaaccattcatcttcaatgtgtattcatccttctatccattttccaaagtggtgacttagggtcgatctttaatgtgtattcatccttctatccattttccaaagtggtgacttagtgtcgatgtatctaaacctcacatcccttgatactgagtaccacacttgcgtgatcatactccaccgtcccccagccatgaccccacgtgacgtcgatgtgccattcccattctcaatgacaccaccctagccttagtgttgtccatgtgatgtgagacacgaatccaaagtcacaccaccaccaacctttgcacacccatcctgtgcaagtctatatatggtgattgaaccatggttttgtttcccttgacatcaagcttttaggatgaagagggaagatgagagctaaaaacctatcttttggtactctttggactccagtggcctagtcctagtcttctctcttgtcttgtctccataattctaaagattttgcaacatgtgtttcaatcagacaaatggagtagttgactttcagttcttactaattttacggggacaagaccatgtcaggcacaagagatctctacgccccggtggagatgtgggaagaaaacgttctttgtggggaccaagacaagattatttttcccacatatgatgaggacggggatggtgagaacccaatactaagagcaaggctaatgattagccagctgaagactgtagcaggtgccatgtcatataaagctagcaaaatatagctaactgattttatggattagctcataggttggttgtactagtatataagaatttaatacttactacatgtgtactcataggactaggaggggctgcaaaagcgccagctctttcacatgagacaggaggtctatccaattttagcccgaaaagagataaacacctgctgctctctcctctctttattttctccctcctgcacctaagataattaggtggcattcaattttgccggctgagtaatatatgctctataagggcactcacaatgcaagactctatcacagagtccaaaacaattaattacatattatttatggtattttgctgatgtgacagcatatttattgaagaaagatgtagaaaaaaaaagactccaagtcttatttagactccaaatccacattgtttgaggtaataaataactttagactctatgatagagtctgcactgtgagtgctctagcaaacgcaacgcaacgcaagcggcgcgatccggtttggacggagccagcaggcagcccgccacaggtggtttgaaacgaggagacggactcgatcactcgatgctggtggacaccgtgaccggacacgtagcagcagcgttcgtacccgttccgtccgttgtgtcttgtgtgagtgcgtgcgagacatgcttcctaggaatacctaccaaccgcaagcctacatgagcacgtgcgggaccaccggcgacgaggcactgacgttgggcccagccaccatcgccggaccgaaaaaggggtccacccgtcatccccccgccgcgggcgttaacgaccacaccacgcgacgagacgatggaggggcgatcggccacgcacgcgtgacgcgtttcgaatccgttcgaaaaaaaaaacctcccccggccccgcacccacccccgagcagagcaacggtcacctcctcctcctcctcctcctcctccgccctcttcggatcgtcgctttccttttctcgcccagccgctcgattcaaatgggggatccgcgactcctctctgtcctctcccactcccactccactcctctccgcctcccctcccctcccctcaccgcccgcgccaccgtcacgcgatcgacgtgatcagtgaagtccagtcacctgccgtgccgtcgtcaccgcgcacgcgtcggtccgtccctcctcgccgaactgatctcggtaggtggcgtgagatatggaggacgaggggagcggcggcggccggagccggggaccggacgtcaaggccgtcgcactcgcgcacttctcgtcgccgcgaagggccaagacggtgaggatgtccgaggcccgagacttcatcatcccctacgtcgccgagggtacgcgcctatctcgcttctccgccgccgccgctccctctgtttctctccgcagatctcgattgccggctcgccatttctcatctctgtttttttgccgttgcggtggccaccagtgggttcgccatcgggctcgacgggctccgcctcctcgggagcggcgcgggcgctcggacacgccagcggcggcgatggcgacggctcggcgtcgctgtccgggttcccctctgacggcgcgatgcaggacacgccggactacatccggaggagcgccgcgcggcacagggtcgcgcccgtcgagttcttctccgcttcagtctcgccgccgccgtcaccgcccgcgggacttggcgcagccgctgaggggatggcttctagtgagaaatgccatgccgcggatggggtgtccgagagcgatgaggccgtggacggtggccgaagcggcacagagagcctgcagctggaaggaattgaagaggttgtccacgtcaccagaaatccccaagaaattgcatactgctacagctgcgcactgtctaataactaaatacaatttccgtgttccttgcaggacaaatccgattgctgtggcctgctgaaacaacagtatggtgtgcttctgcgtgagaaggaggaatgcaggaggctgttagaggacctgatgagggagaacgagctcaagaccaggcaatgccgtgaagcccaggagtcgctccatgatctgcagatggagctgatgagaaagtccatgcacgttggctcactaggtaaaggattctgacatttaatcacaattatacactctaggttgcagaaaatttgaccgcctctggcttgtgcagcgggttcagttcagaatttgatagtcttgtaactaagcgcacatgctcagttcactgaatttgtcacagttacacactttataggttgtggaaaatttgaccgccgctggctcgtgtactggttcagttcagaatttaatagtcttgtagctaagcgcacatgttcagttcactggatttgtcatcaaataatgtcgcgcatgcttaggcttccttgtttttatcggaagcggttttgtttacacttttcgttgttcatgcagcctctgcagtggaagggcaagtgaaggagaagagtcgtttgtgtcaattattgaaagaattgggcgaaaaatttatggtattcggctcaaaaaacattttacacacttgccttgaactttatgtcatatataagaggtctgataactttatcgtatgtggtctgacattaattacaatcatatgaaggtattaaagtcagagcaccagaatctaagacaagagtcactggagtacaaaaaatgtgtgttagatgcttcacaaatgtccgcaacaattcagcaatatggtatgtttgtgatggttaagccttgaaatatcttcattattaatattcttgtttgtatttgcttccttatgaactaaatgactgtaagcatgatatgattattttaacagtgaatcaatatgtaagtttggactgtgagttcaaagatcttaaagaaaagtttaatgaggaggcaaaggagcgaaaggatttatacaacaagattatagagctaaagggttcgttgttttattttattttcatcttgcaaatttttattgcagattatattggtgacaaaactaacagtgacttgcatgttgcttaggtaatataagagtattttgtcggtgccggccacttaatgcagaagaaatagcagaaggagcttcgtcagccattgattttgactctgcaaaagatggagagcttattgttaggggtcatgtatcttctaagaaagtatacaaatttgattctgtctttagccctgaagaagaccaaggtaactcatacaaatgcattcacttaccttgtatcgcattatggctcatgttttgtattgacgtgattattcatgcttttaataataattttttattcaacttatgtatacagaaaaggtttttgagaaaactgcgccatatgcaatttcggtgttggatggatttaatgtttgcatctttgcttatgggcaaaccggtactggtaaaacatttactatggaaggaattgaaggtgctcgtggtgttaactaccggaccctagaagaactctttcgaataattaaagaaagagagggcacattccaatatgagattactgtcagtgttttggaggtgtacaatgagcagattcatgatttgctacttacaggatctcaaccaggcgcaacaacaaaaaggttcgatttaactcatgagctatattattgtattactaatatataaatgtcgttatgagattataccttttttgcagactggaagtaagacaagttgcagaaggggttcaccatgtaccaggacttgttgaagcacgggtgactaacatgaacgaggcttgggaggtgctacaaactggcagcaaagctagagtcgtgggttccacaaatgctaatgagcatagtagtcgatctcactggttggtaccttttcccaaagatattttgttcacttatgttatcatatatgtgctaattgatttttaatttcagtatacattgtgtaatggtcaaaggagaaaacttgatgaatggagaatgcacaaagagcaaattatggctaattgaccttgctggaagtgaaagggtagcaaagacagatgcacaaggagaaagattgaaagaagcacagaacataaacaaatcactttctgcacttggtgatgtcatatctgctcttgcaacgaagaccccgcatataccctttaggtatttaaatttgaattctttatttaaattttagtcttgtaacttaaattatgaccacttatcgacaattgttgtttcaaattacaggaattcgaagctaacacacttgctgcaagactcattaagtatgtagtcttttttcttttatgaaatggtaaaatcttatacttttaacttttagttttataatgcaatgtttaaacaatacaggtggagattccaaaactttgatgtttgttcaaatcagtcctaatgagaatgacgtgggtgaaactctttgttcgttgaactttgcaagtagagtacgaggcatagagcttggtcaagctaaaaagcaagtcgatgttggagaattgttaagatacaagctcatggtattatagcattatgtcaatatatgtatgtgcagatgtgttgtaaaatttgaagtttgctcaaatataactcgctattggttctgctaggttgggagagccaaacaggatagcaagaacaaagatgctcagattaagagtatggaagaaaggatacaaacacttgaagcaaagaataagaccaaagatttgctcactctgaatctccaagagaaggtatatctggatatatttggttgtttattgacattaaattattcttgttattaacttttccctatatataatcattgaccaagaacaacaattttctacatattatagaattcttgttaatacacacatgctctgtgtgtgatagttgtcactattatgtatagtgttctggatattaatagtgccaatgcttggatgccaaagaagtatggctaggacttgcttttgctgtgatttataatgccaattgcttggatgtcaccttgaaactagtatggttcaggactctagttctttcagtgatggtatacttgttcgttataggcaaatgttaaggtactttagggagactaataaagatcgttcattctatttgattaaatggctagactaaagtagataatatattatcttggaaagtatcaagtcatccatgacaattaacgtgtttatttcttgtttttcaatttggaaacttagcaaaaaagggaacaatgtatcttgaatgggtacacatgtatttgatcctgatgcttttgccaatgtcatatgtctacgatttctaatgaattattgcctagtagctaatgttaagcacggattcaacatctcatgcaaaacatacacaatttatgttgcaaacttttctcagatgcaaattagcagaacttatcattttcatatgtaacgtaaatgtggaatatgtgacaacgaacgacgatagttggcactagtgcacacaatttaagttcaattcgtgtcatatggaacatgtcatgtacacattttttttttcaattgtgagtgttgcaccttgtccactaaattgattgactagaccaaccagatcatgcaattaacttggctgttacaaccaagtaaatgttaattaaaatatcaattagactggttaatcaagaaaatggatgatatgattttgtcttcttatatatcatgcttttgcaaaatgtgatgtggtgaatgatggagtgtgcatgggaaaattggaatcagaataaaaaattgacatgcttattgctatttccaaaccttttgtagatcaaagagctggaatcacagcttctagttgaaagaaagatagcacggcagcatgtcgacaacaagattgctcaagaccatctgcagaagcagcacggcatgaaagaagacaactcgtacctgagaagcccaatggccgagaggaacctcaactccacagcagagaaagcagcagcagcagctaaagacttgggcatctccaagcagatgttctccgacagcaacgttgacacttacagcttcaagcagctgatgtcactaggggacgagaaggagaacaaccctaaagctgcgcagctgccgccgacaatgaaagcgagacgagtctcactctgcaacgatggagcttaccagcagccgctgaacccggctatgcgccggaagtctctgataccgcctccacggcgcagctcgctgctgccaatgcccacagcaaagcctgcagcagcagcagcgccatcgccgcttgacaagatcacagagaacctgtcctcgcccccactgtgctctcctccggttgtctccatcgacaagggaagcaggagtaagaggatcaacagcatcctgcggcgaagcctgcagaagaaggtagtcatcaggccgtctttggcggcgcaggcagggaagaaagccggtgctgcagctgcccaggggactgacaacgcacgcagggttgcacgtcgagtgccgagcggcggtgggcagagggtgcagcagaacagggacaaggagcgggggtggaacaccgggacgagcctcaggaacaacttctgaccaggagatcgcagcagcgctattcttaaaataagtctgtgaaaatttaggtgttttttttaggttggttgtacaaaatttaggtgttgtttgattgagtttgtgagttctcgcgtattgtgagagaactctacgaattgctgccgactccgatcaggtttacaatgcttccaactttttgtgatgctgtgaaccactttgtgggtgttaacgatctcttatgctgatttctatctttggaggaatactgtgacagagctttcctaatgcgtgaagaaattttgcaatggcacgtggggattcttttcggtagtaggtgtgcttcgatgacccttcttttttgacagagatctcatactggaaatgatatcactgcaaaacttgtagcttcgatgacccttttgacaaagaaactcatggtacgtaatgctaattagaaatgatagtcactgcaaaacttgtcgtagcttcaatgacacttttcagcagagaactcatcc

SEQ ID NO: 4889 - DNA, 4597 bp, Sorghum bicolor
ccaaaagtctgattttcatccctgaacttcaaaaccgggtaaaatacatccctcaatttttgaaatcatgcatattacgtccctgacatggctatgagcggttttgaaggcagttttgtcttttttatttttatttattttggctgaatatttgtaaaattatagtaaatcacataaaattcataaaatagtaaatatgattttgttggactccagataagtagatctacatagtgaacatataatatagtatgctttagtacaaaatttttattgtagctttagatctgtgtttttctataattaattagaataattcatagctatagtttgtgtggtctaattgtggtgatttttttatgttagactaattattatatgtttaaattatggtaaaaatttcatactcattagatcatgtataacttagttatagatttattataatttaacaagcataaacctaaataaatctataactaagtaatacgtgattcaatgagtataaaatttttactataactcaaacatagaataattagctcaccatataaatttcatcacaattggaccatagaaaatgtagctataattagtctaattaattacagaaaaacatagatctaaagatgcatcaaaaaaatttgtactagaacatactatattatatattcaatgtgtagatctactgatctaaagtccaacaaaattgagttttttattttatgatttttatgtgatttattgtgatttttcaaaaaattcagccaaaataaataaaaagaaaaaggtaaaaccgctttcaaaaccaggtcaaggatgtaatgtgcacagtttaaaagttgagggatgtattttgtccggttttaaagttcagggacgaaaattagactttcgcgaaagttgagggatgtaaagtagactttttccgagcagaataggtggcgggaattgcgcttgacaggtaagtgggcctgtgttagcccatgaacccacgcttacggatatgagtttttgttgttgttattattattattattattattattattattattattattattattattattattattattattattattattattattattattattattattattattattattattattattattttgaattttgcaatttccctctcagcttgtcaattgggagaaacgagtccattggctatgtgaatgaagtgaaaaatagacacaaatctatcggttgaatggcagaaaactaggaggattcacttaatctttactttggaatgatgaaatacaaaataccaaaattttcaggttcatgtttagttccattaaaaatgcagaatttattgccctcattagggcctttggaggctcttttggatttttttgatctcttgaggccaaaatccaaaatgaagaataaccacctttgtaccaaaaaatttgcataatgtttagttccattatacaaagtaatgaatcaaaatctaattttttttagaataaaagaggaactaaacacagcctaattattgtactttctctaacacttttgtccttttttttatgtgctacatatcataggccttgtttagttcaccccgaaattcaaaaacttttcaagatcctccgtcacatcaaatctgtggcatatgcatgaagcactaaatatagaagaaaacaaaaactaattgcacatttgtctgtaatttacgagataaatttgtcacaaacaaacaaaatgctacagtaaaaaaaatccaaaatcttttcggaactaaacaaggccatagtttccttaatagacaaaggtcaccagcgagaacatttgcaggaaatcaccccctcatccagcagctcgaatctcaagaacattgaatctgatggctcggcaataaaaacaaccggcaacgccaacgccgccggctccgcaaatgcccgcgcacgcgcgcatgcgcgcctccgcctccaccgccgccgtagcctgtatagctgcgcatgcgccgctgccagcaccacgccctcgccgccgccaagtcccacgccgcgcttctcaagtccggcgccacctcccccacgccctggaaccagcttctcaccgcgtactccgcctctggccccggctccggtctcgccgccgcgcgcagggtgttcgacgagatcccccgccccgacgcggtctcctggaactccctcctcgccgcgcacgtcgccgcgggcgcgcaccgggacgcatggcgcctgctcaaggacatgcacgcgcgggggctcaccgccagcaccttcgccctcggctccgccctccgctccgcggccgccgcgcgacgccctgagctcggcgcccagctgcagtcgttcgccgtcaagtccggcctcgtcgacaacgtcttctctgctagcgcattgctcgatgtgtacgcgaaatgtggccgattgagcgatgctcgacgagtgtttgatggaatgccagtgcggaataccgtttcttggaacgcgctcattgctgggtatgcggagtctcggaagccggcacaagcaatggagctgtttcttgagatgcagagggtggagttggtcccagatgatgcgacatttgctgcgttgctagcgacagttgagggcccgagctggtattccttgatgcagcagctgcatgggaagattgcgaagtatggttcagcgctggggttggtagtgctgaatgcagcaatcactgcatactcgcagtgtggcgcgtttgcagactctagaaggatctttgatggaattcagagtagggatttgatatcatggaattctatgcttggggcctatgcttaccatgggatggacgatgaggcaatgagattcttcgtcaggatgatgcgggagagtggagttcagcctgacatgtatagctttacaagtgtcgtaagtgtttgttctgagcatgggtgtgatgatcggcaagggagatcaattcatagtttggttgtcaagattgggttggaaggagtcacacatgtttgtaatgctatgattgccatgtacactaggttcactgagaactgcatgatggaagatgcatataagtgctttgattctttggtctttaaggatgcagtctcctggaactctatgttaactggatattcgcatcatggtttgagttctgatgctttgagattcttcagattcatgcgagcagagaatgttagtacagatgagtttgcactttctgctgctctcaggtcttgctcagaccttgctgtacttcggctaggtagacaagtacacagtttagtcatccaatctggtttctcttccaatgactttgtttcaagctcactgatcttcatgtattctaagtgtggaatggttggtgacgcaagaaagtcttttgaagaggcagataagggtagctcagtgccctggaactctatgatgtttggttatgcacaacatgggcaggcacagactgtgactgacctcttcagtgagatgctggaccataaggttcctttggatcatgttacctttgttgccctgcttactgcctacagccatggtggtcttgtagatgaagggtcggaaattctcaattcgatggaaactaggtataaaattcctctgcgaatggagcactatgcgtgtggagttgatctatatggtagggctgggcagcttgacaaagcaaaagagcttattgagtctatgccatttcagccagatgccatggtgtggatgacccttttaggtgcttgcagaatccatgggaatatggaactagcaagcgatgtggcaagccatttatttgtggcagaacctcggcagcactccacctatgttcttctttccagcatgtattctggtcgtggtatgtggagtgacagagcaacagtgcagaaggtaatgaagaataggggattaagcaaagttcctggatggagctggatcgaggtgaaaaatgaggtgcattcttttaatgcagatgataggtcacacccaaggatggatgaaatctttgacatgttaagaatgctgcttcaggttgcacagcggttttgctcttctggagatgaagagattctcatgaaaatatccagtgatacatgacctgcaacctttgtgttgtacatttctttcttagccagctagtgttatccattgtatctctaggcattgcttagcaaagatatgtcaaagttaatgcagtaacatttatttgattcaacttttgtgcttgtaatttccacctagcagattcaaatagtagtaacagcttaaatttacagttttttggaaactttcaaggtgtacatcttctactgatgtggcttggctctcatgatgaagccctacgcaatttactccctatatatatttatgaggagaatagtaatagtcttcatttccttttctgagctcttattcataattaaacttttccacatactgcttgctacttgtcccaggcaaagggtgcatatagaggttggcatgcccatcttcaatgtgtttgccacatggctcaagtgttctgccaccataaaagcttttatagacacgacacgagagatcatgcagtttggtctatgaaaggcgaataattcaaa

SEQ ID NO: 4890 - DNA, 4745 bp, Sorghum bicolor
ggttaggttaatttatttttccaaacagaccctaatttagaggggacactcttgccttgtgagcacgtcccacgagagagcatatatggtaaaaaaagtagacaaaaatattattttaacattttctaggcccttaatctcaaatgcatctttcgcccatgtgtccagttttcctagtataacaaaaacatacattttttgaatagtacataacaaaaatatatatccactcatgtagaaaaaatattactcccactgctaaaagattgggctgatagtttatgaatccaatccattgttccaagaatttcgagctagccacggcccataaccgttcgtacatttcccatctaacccatctatttatattaaaaaaaatcatacctagatctagaaaaattcaaaagttttgatctattggcacctgtccatgagccatattcggaactacgatccttcctactccctctattcacaaaaaatatatatatataattatagaatctgtgtcaatcaaagcaactcaagtttaaccaaatttatagtaaataatattagtagttatgtattcaaacaaaattcattataaaatacattttataactaatctaacggtatttattttatatcttggatgataatagttttttttatataaatttagttaaattttaaactatttatctttttaaaaagctagaatcacattctttcatggagtgagtactaaaaaaaagttgtatttcgggcctttcgcctctccacgttgggccgaaacagaaagggcccaaactccgaaacgaaagcatctggcaggcgcccccacgaatcatcgaaaaactcaaactgccgctccctcccctccgaccgccgcctcatcttccgccgaacccgcccccacccacccaccaacccccccggagccggagcgtccagtgcagcggcagcggcagcggcgaccccatctccccgccgcaacaactcctcgctcgccgcctgggcatcggcgtgcctctcctccgcctcctcctctgccgcttcgccggtctcggggatccaccgggattcgtcggtaaggaacaacacaaccctaacctcctctgctctctgccggatgttgttgttccccgaagcgtggggtttggtctgcgggatcttcgaactgcaacccgaacagttctcgagtctcgatcacttagactaggggagatctggggctggtgcggtctccttgcttcgtgttggtgcggaaatggaatccgcggcgtccacggttcttggcttcttgttcggctcgattgtttttttttctcttcttcgtcgctagcgcgcgcaagatgaatgaagattggtccttgtttggttggcgtatcagtggatttcgttttctttggcgcgggtgccgtttactttgaattcttgggtgggttcgaatgaggtttctggggctagtcattctccagcctgcaggggcggtgttcttccgatcatgtttggcgagcattaactcactgtaccgtttctttgagtcatggatagaaatctttgctttttgatgaaaagaaatttgtatcatatcgctttttacttcattattactctgggactgaacctctgaatgaatgcctaaagtcactgtcgtggtctctgtaacagtcactacttggtcaccctttttttttctttcaaaaaattttggcactatgtgttcttcttcttgttatagaacatagatagaagaagcatactttgtttatattgttagtgggcaccgaatctgaacaagttttatgtcttcattttggtatgctttaactgaagaaaccatgtgttgatcgatttattctctccccaaaactacatgctgtgtttacctttattaacagcctaaacatatgtgctgatcgatttatttgctccccaaaaatacatgatgtgcttacctttattaacagcctgtattttgtttctttaatgaatccagtgtatcagtgtatgcaatggctacaagtcttggaatggacgaatatgcagaactggaggtctctatgatggatcccactgacaagaagcctgccttcagaggcttgaaactgtacgtgaaagaactagattcaaagacacttcctccgtttcttgctcgtttgtgttctcccgacaagccttcctcttactctgaggatgagatcctgtgcattttcgagactgcgtctgaagttcatggccgcagcattgtgccgcacattggacagattgtttcagcagttgtcaagatcatggcgtcaaattcaaagcccttgcatagtgctggttgctccaaggtagtttgcacattatcccgctactgcattgatcccctgggtagagaagaagagaaatatgagatcatgggctccctttgccgtcccctatctgatagcttaatgaatactaacaagagcatctcttctggttcggctctttgtattgctgcgcttgtccagtccaacaattggcaatttgcatctaatgagttggttaatgatgtttgcttgaaagtgtcgggcgctctagaggaggctcactgccagactgttgttcacgtaagcttggtggttgctctgttaaaacacaatcctttgacactggagccttatggacgatcattgataaggtcaggcttgcagatattggaccacagcactaaggcaaacaattctcagatgattatgtcatcaattcagatgatatatttgatcatgagaagcttgaatgtgaggattataaattctgagatcagtagcattatccatgctttggagcacttccaagatggctttgtttcagatatatgcgctgcagctttccaggcaaccgagactgctaagttacttgggaggcaggaggaacatggagcccacaaaaatgtcagtcctttgggaagctgtagtggtgggaacagcaggaaggggtcaaattctccaattgatcatgcagatatcagagacagtggatctagtggatctcctcgtgagttacaatctgtccgttgttttagtgacttcaattctcagccaccagttggagaatgcactggtattcttggaacttcgcgtgcaaggcggcgactttggagttatggaactgacttttcacatgggatgtccaacgatgagcttttccacacttcggcacgtgattatcatgaaaatctgggtatcatagcacaatctgattctgctgatctcgtcaagtcaagtaggaggcgctctgatgtgttgacaagaattggtgatccatgtcctacttgtttaacacccagagctactaatcaggtatatatggcatatcatcatgtaaattgagcagttttagtatgattgacatacttattatattaaggtcatgatgcatgagttactatttgctgccctttggaaattggaatattatttctgtttgctgccctttggaaattggaatattatttctgtttgcattgttccttgaatgataccagaaacaatcactttgacttttgttgcagaaggaacaaatagcttttacattttccttttctggtcagtttttttttcttttttaaatactgtcttcctattcttcgagtggtgtactggtgtatccgtgtgtggtaaatttataggcatgctgaatgtttctgtgcagggatactcattcttcagaactttgtttgcagaatgaagtttcacgatactgcaccatttgtagattaaagtgaattcttcacacttttctttttgaactcaggcgcgcaggcgacaagctttgtcaactccaaggaagcagctccagtctttgacctattgcagtgattcagaaagagatggccatcgcctacctccaagatcagcttcaaggttgatgcatcgcccagaccatcttttgtttcaaaagaattttcaaagtgaggaaaggaaaggctactgcaactcgcgacagaggaaccaattgcgtacacagaccacagacttgctgagcgaagacttgaagttccccaccagcagcaggcgttctgatagtgcacgggctcctccatgtgaagaacgccaatgtgatgctgctgctgaacatcagaaggtgactgggatggagaaaaaagaaacaaactgtcgtcgaagcaatcgattaactctatttatctgtgccatggtcttcgctgtgttgttgctagctttgtggaagcagcaggaccccagtaaggaactgtacttcgtgcctacttagcttatgtctgtgactgtgtaagcttgtcccttgtaagaaaaaaaagagagagagaggttcttttcgtttcagtgccattgtaattgtgcatgaagccacacccgctttcaggagtgggtctgatgtttactgtcgacaggtagtatacatggaatggtgtaaattggttcttttgatacaaatgaggtagctgttggaaagcaatggaaatttggatttctggcagtacatgcttgtctgtgtttctgaatgcgttttgaaatggcatgattgctggacattcactttcactgcgaaagctaagctggcatgcatgatgatggcagaaccttcagttgtgtttattttatcatctgactgttattatatttttgtttgtactgttattttatcagagtgcatttgtcatgggattgcagccacgcaaggcctgatcctctctggctctgtgattctgcctacaagagttcatagagtccatgtaaatactacggagtact

SEQ ID NO: 4891 - DNA, 3473 bp, Sorghum bicolor
ttttattcatctatgccttgcattggcaacatagctggtcaacactacacgtgcatgctctggaattaattccacatatccttggaatttcattagcaagaagtttggcatcaatcgccttgaagaaagtttggcagcctgagatttcgacatcatgtgttttgcttcatcgtaaatggaggccggtgtagacgatgcaagccacacaaatggaggccggtgtcaagaatggcccacgaagattcaggctggagcattggtggatccaagataaaaatccacctatatggcgaactttgtaccaaaaaaacttatgtgacaaattaaagcaatcgtgtagaaaatataagagataataatgtggtaaactagtgatataccataaaccatgccacaatctcataaatggcattcaagatatattaaagattaactgaaattgatcataaacataaataaaactctaaatgataagataaaggcaccaaccattagatatcttcttatgtttgtgtgcatggttcaatctgtacatgagccaccgaaactttgctaaagtatctctttagacctacaactatcaactaaagaatagcataaatcagagtatcaaactatcgatcagtagctgatttttgtactacaagtaaatcaaattcacagaaggtcattgaatcaatttcacttaccattttttttttacttttgtgctgctgctgcatcagaagtagcatcgtttgttagtattaccgtccctgtccatcattgtgaactcagtagaggcacggccggccagcgatataggagattggacgaggcaaaaaatgaatcgttgctctcagtttgttcgctttctacatggacttcataactgacaaaatacgcggccgaacaggcccaggtcggtccaacagccgctggaggcgagaagaaggtaggccatttctgcctcatgagccactaccttgtcagttatgtgtgacaacggaaaatttgtgttgcctcggtaggagattaattaaatttatctatttagaatggaccaaagggatgacaaaatttttttgacaaattaaccatccaggcaagcttcaggccacatcgggaaactcgtgcggcctttctgtacccagattatttttcaggcttgaacgctagctccacgtacgctgaggccaaggattaaattaaattgcccggtcagtggcccaatttgtgtaagcataaagttgctagaattgactacgtaaatgcatcagtgtagcgtgtaaactgatataatatatgttcacaaatacgtgaatactgatggataaagttttgaataagactggaggaaaatttgaggaattccaggacagattggtgacttgcttgtagatttttcttttcatttaactccagctgtacaaacgtgtggtatagctctaggaaatttcaactatatataagaaattctttatggcaactgcatatatcaacactcgattcctagtaaagttggaacattatgtgtgtggtccataataatacaagcaagacagcaagagctaaatatgtttaatctctaccaaaacaagaatttgaaagtgcaacaggttcgacctgatatataatatttgaagttgcaaaaggaattattagtacagggccggtggttctccttatgtcaaataatcctgctacatatataatcatattgtccaaacttccttaactcaaacttttgcacgagctaacagagttccctgtcattaatcattgtcctatctaatctaatgctctgtaatcctagtttcaccctggagccaggaattggcaacatatatcttgtcagttcccatatcgatccattgttcgagcattgttttatattataacttttgctacataaccttagtgtcattcgaaattgcaacaacatcaccacgccgattacaactatatatatattgaggccttcttgagctaaacacctaactatatatacgaccaaagaagtttcatatatccatccattatctgaaaacggaaaacctgtagacttgtccaccccttctttctaccggaacgccaataaatccaagcccatgcccccaaagctctactcatacgattcatcgtcgttctcacccaccagaggagaaaattgcagcagcacataattgactactgcatccatggcgtccacttccatgtccttggttctcttcctcctcctcgcaaccttcgccgccggtgccagcgccgccaccttcaccgtcaaaaacaactgcaactacacggtgtggcccgccgccatcccggtcggcggaggcacgcagctggacccaggacagacatggactgtcgatgtgcctgcaggcaccaccggccggttctggggacgcacgggctgttccttcagcggcggaagcggccactgcgacaccggcgactgcgccggcgccctcaactgcaccgtctccgggcagccaccggcgacgctggccgagttcagcatcggcggcaccgaggattactacgacatctccgtgattgacggctacaacctcgccatggccttctcctgcagcaccggcgttactctggtgtgcaggagcccgacttgcccgcaggcgtacccgtttgcgagcgaggatcccgagacccatggatgcagcaccaacagcaactaccagctcaccttctgtccatgaagcggcaggaggattattgtggtcacgtacgtacaccacagatatgcatgaaatatctgtggaaaacgaacgtgtgttaccgcgttattagtgttctacccgccatgcatatatgtaagtagatagtacataaaaaccttctaaataaatctgaaaatgttttcagcaaacaaaggtcaaaggtgtgtatttgctaataaaagctagctagcgccccatgattgtgctacacctggttcgtgcgttcttgattacaatatcaataacattttccaagaatgagtactgtttgtttagggcgctcctgaatattgttgacttcacaattttttctttaacattttagccagaaaaatcgtgaaagatctctctctgctatataaagaaaaaaaatgtttttttttgacagaaggagtacgcttgtggccgagtggatgatgtaaggagtaactagtaggtgggaccctagactattgagtcattctttgtaggtcaaattttgaaagctgtaaggtcaattttttcggaggagcatgtatatatactccatgctaaaatctattgaatatatactgtatatatatgcttgcaggcgaagatactgatcaaattaaagaatgccaaaagtcatataggtcggcgccttggatcagacgtatatatatacgtcttgtatgttgcccactatatatagccagtcaaaactacagaagcatgcattagaattccacgtaccatgcatgggaattccacgaacacggatacgaatttcat

SEQ ID NO: 4892 - DNA, 4108 bp, Sorghum bicolor
ctcctttgtttaagccttgtgcacagagaccaaggagcatgaatgactcacgtcttttcaataaatcattgtggacttgtggtccaattaatctaattaatgtgcatacctgcatgcaaccaaggagcagccaagatggcctaggtcctccatggacacgtgtgcatgcacccaatgaatggccaacatgcatgcaagacataaccataattatagccggtcacctcaagatgatggagataattggaatttttttttgcttaaatgattgagataaatggacggagggagtataacggagggagctttcaatgctatttttctaaagctgaatctttggatgctatttttctaaactccggttctttcaatggtatagatccaattttccctatctctttttgtgttattttttacttatatactaaaatcgtttaaagaattttgtagctgtactgaagattctaccggattttgttttttattctgttgtattgcgtattaattttttggttacatatatcctgattgagatctgcatggagccaccccctgcagcgaagaaagcaaaggagaggccatggatgacgataagcaaatggctagcggcgacgaggatccccattctgttgcgccctagtgctccgctccagcatttcctcctgtgtccataagctccgctctgttttgggcccttcgacttgaagaagaaggatcccctcctcccctccctgcacctcgccaagaggtatggatccacatcctctgtttcttttcttccccttcctgattgagtgtttcatttggcaagacacacagatagcgaggttcgattagacatggcggttgttctttctggaaaaaaaattggaattattctttgttagtgaaatagtgatatcttttgtctcgcgctactacaagtagctgaaatataaggtggatcagatctatccattcagtggttggtgcactgtgttgtgcatatcaatgttgcagacttgcaggtgcaaaaagtgcagtagtatcttgagcccatgctggtaaagaacgcaactcttgcaaaactgttcttcagaagctagttttgtttctttaagaaaattttattgtcagcttttctcactgaggctacagtgcagtttatgtgattccggaaaaggaaggtcactcttcatggcttggtaggattaaaggctcgtcctttttaattaaaaaacatatacttgtttctggaacaaatgagaaacatatgtaggcagtagcagctctactttctgttaagagtgagaacatggggagcaggggaatagagttatgtgttttatggagagctgatctaaccatgttcaagtgagtgccgctttcagtagtttgcagtcgtgagtgagtgcttcttgctctctcacccttcagcgtcaatttaacaaaaccacatttcctgtgaagcttgccttcaccatcatttcccattggatgctgctttggtaaaattggatttcagtttttagggtatggagattctcttgcggagcaaggtctataatattgtacatctatttagcagcttctgtgctttttgaataatctgattgaaattactcattcatgtgagaatggagaatcatcagttgtagttgattagatgaaaatgaattctcctcatccctggttagcttgagaaacctttctgcaagctctaaacctttatgttttgactaatttcaaatatctcttgctgcatgtcaggtgggatggtctcaaggatgggcatgcgtactgccacctgaggtggtgtttgacacgcggttcacaagctctgcctctcttgccattccatctccgcatcgcctctcccattccatctctacatcatctctcccaagcctctgccattcgcagccacggtcactgttgcccgcggtggtttatttcctagctctgaccaggattgtcttcgtgagctggaaggggttgccatttgccaaggaggcaaacggatggcggcccggcacctcttcctccaaagttgccgcatctactctacctcagcctcagctgaggacatggtcatctcctccctccgcttcctcccctcccctaccattaccaatccacctccaatccctactattcttcattctaccgactctcctcctgacccccatccaccgcttacctccatgctcctatctgccgcagatcgcctccgtggggtcttcctccgcaagccccctgggcgcactgcgctccaccaggcgctatcctcaacaggcattggtgctgccatggcgctctcaccagatgttcttgccaatgttgtcaacgccggcgacctcagtggtgccgctactgtcactttcttcgattgggcggtcactaattccaagcctcccccatccgtccacacctgcaacattgtcatcagggcattggggaggaagaaattctttgattttctggatgatgcccttcagatcatgcgcagaaacaacatctttccagacctgaccacgctggagatcatcattgatagcctagttgccgccaggcatgtcagtagggctgttgaggtgctcagtactgatcaatttggatttgggattgggaaagcttgccacaaaaaggaggcatttactgtcctcatcaggtgtctttgccggaggtcacatgttggccttgctagctcactcttgcaagctgctcgtaaggagttgcttggtcttgattgcaatgtgtacaatgatgttatgggtggctgggcgaggtttgggagtgttgataaattgcaggaggtttggacaaagatgcaggaggatgggctggttccaaatgaggtttcacattgccatctaattgagggattgggtagagccgggcagactgaagatgcactcagggagtttgagaatatggtacatgagagatatggtccaactacgatggcctacaatgcacttattttcaattttatttcagttggggatttggacagttgcatcaagtattacaaggatatgttggaaaagaactgtcccccaaacattgacacgtactccaagatggttaaagcctttttgaaaggtcgcagggtagctgatgcactccaaatgtttgatgatatgttagtccaaggagttctgccaaatactgggatgataacatcatttatcaatccattgtgtacatttggaccgcctcacgctgctttgatgatatacaaaaagagtaggaaggctggttgtgtaatatccttgaaagcttataagcttttgctagaaaggctcgctaaatttgggaagagtggaattgttttggacatttgggaagagatgcaggagtgcggatatcaacctgataaggagatttacgagtttattgtaaatgggctttgcaatgtgggtaaggttgatgctgctgtgtctgtggtggaggaatcacttaggaatggcttctgtcttgggagagttgtttacagcaaactgaacaacaagcttttggagatggacaaagttgagaccgcatataatttgttcaagaaagtcaaacatgcgcgtgcacttactaattcacgcaattattgtcgtgctaatggttggcattcctgagcataaccagtttgtatgtgggtggtaaaccaacagaagagttgcagatctagtccgcattgaggaatgcagtttacatgcataaacagaagagcataaccagtttgtggatgccaagtgccagctgcccagctcacatcctgcagccagcatcaagtggcctagcaattcaagttggccaggacggcgatggaggatgtgagctgcagcacctgaaggtcaaaatggtagctggtatgtgcctataaccacaaattttatgtatgtatgagtgctgtaagttataaccctttgtccccataccctgctggcacttgtcatttgtcaaaacacatttagtattagtaatatgatagatactagcaatacacacatgtttttacccttttgttttagctcactgatttccttcctcatgcttataattttattttgtgagtactatcgagattactatcaatataatttgttttgtgagtactatcgatatgacaaatcta

SEQ ID NO: 4893 - DNA, 3253 bp, Sorghum bicolor
cagaaaaactttgctattgtgcattctaataggatgtgcttcactgactctttatcatcaccacaaacatcacagtttgcaataggctctatgtgtctgtgattcaggatgtctttggtcgggaaaaagtcattaaccacgcgctaccagaagacacggacttttggcgacacacataatttccaaattagggaccacgtagtgtcaccagatgaggatgcttgtgcagcttcctgttgctgccactgctcatacacatccttgaagacgcataaatcccttgaagggttttgtatagtactttcagggaccagaaggcagtttttgtcattgcacacagatttgagtggcggtcattgttccttgcggtcgtggacggaagggtcttatctcttgtcttgtttggtcaatacactgtgtggcattctactgttcatgactcctcgaacaaaaggaaaaagactgatcatatttatggcttgcaggatttggacagctctgatgcatcatttcacggcgacttttcgcgacatatatgcaacttgagggtatatttccacccatttgtaagggcactcccaatgctagaaactatatatatagttttaatactcattaaattttatagacactatatatatagaaactatagtcctaatggatagtttctatagaatatttttatatccaatcacattcattctctcttcattcttagccaatcatatcacttcatgtcttggattttgtgtagacatggtttttaacttagacccagtttctatgatttttactctctctcttcaataactacattgccacatcaacaaaatgcttaggtgttactgcaattaatgtctatagaaaccatgatagtttctgtattgggagtgccctaagccaaatattacagatatatatgcaacttgagttgaacccacctaccattatgtggcgtcgaagacttcatagaacagtcatctgcatattagcttaaagaagaatatatataatcaaccagtaattgattggtgcatatatatatatatataatatatagagagagtagctaattaagtgtagctaggtaggtaaacatatatattatggtcaatcgtcgtatcataagccgtacaaatttctacggacattataagtcacaaacttctaattggaaggaactgaccaagtgtctagcttagaccagtctctatagataacagcttgttattttggattgtaagagacttatcatcatactacttcagatcacatcacttcgccgccggccggcatcagactcgcaagaatatccaaggccaatgcacaagaaaacaccccctgttggctgttggcctgtcccaagggattctgtttccacatggtcatgcatgtttccccaattgcctccatcaaacgaaatcaaatggcgaaaaaaaaatagaaggtactaacaggaaaatgtcagaagatatgataggtagaatagttcaaaagatgtgggactcatacctatgctttttcgttttaaaataagaagtaactaggtaattccagtctattgtatctgttcacatctctgcggcatggcaaaaagtcatcattgccgagctcatcactgagcgtccttgaatccgtagcaacgcatggaagattaacatgggccattttgatgtactgctacatttgaggcccaataatccaacaaggcaggatcgaggccgaggaaataaacatttgggcccagtcgatcaacgacacccaccccaccgtctttccgctttccggcgcgcggttggcggcatgggtggcgtacgtggagtcgccgtcgaagaatagcatagcagcactcgtcggtgacctccaccacctgtccggctgtcattactgtcatgcatgcagagagcccgccaagaatagcagcgacgccctgctacaaataaagagcatctcgatcgatgacctgcaagatgcgacgacgccacgccacgacgacgacgatgatagccgccgtgctctgcctgctcctcttctccggccgcctcgccgcggcggagaagtctttcggtggtggaggctacagcgggttggaggccggtgggcagcagccggagacgggtggagcgagcgaggcggcgcttgccggtgccgctgagcagacgacgacaccggcggcatattcgtcaggcggcgacgctgccgctgcttccggcggcagcgccgaagcatcagcgtcgtcaggcggcgaggctgccgctgcatccggcggcggcggcgggggtggttacggcggcaagctggacccggacggcgacccggaggttggtctgaacgagaaggcgatcaaggagatcgtggacgagcacaacatgttccgcgccaaggagaacgcaggcctgccgccgctggtgtggaacgagacgctggccaagtggtcgcagaagtacgcggagacgctcaagggcaactgccagcagatccactcgacgtcgccgtacggggagaacctcatggagggcacgccggggctcacctggaagatcaccgtcgacggctggagcgaggagaagaagaactaccacttcgactccgacacctgcgacgccggcaagatgtgcgggcactacaaggccgtcgtctggaagaccaccaccagcgtcggctgcggacgcatcaagtgcaacagcggcgacaccatcatcatgtgcagctactggccgccggggaactacgacggcgtcaagccatactaattaattattacttgctatgcaccatgcatgcatcaatgatctgcttccttgttttactaactaataataattttcacctcgctcctatatatatatatttgtctcacttgcaattctctgctaaaatatattacttgcaattattctctgctaaaatataccagtgaccattgcaattctctgctcaaaatatatcaattctcttctgccggtgtcttgcgtggaactgcgacttgagcatcaaggtgggccctggcattctttttcagtgtgcatatccttgcataatagtatcgcatacagcatcactcgataccatggcgtcaacaaagcaattaaacccagcaacaaccaattactgtcgcaattcttttggagaaaatacacaataccaatgtactgtgcagttatcaacagcgtgatgcaaacagtctgcaaaaacaataacagcgggaacgaaaacattagacatgcatgcattgtcatgaaaatggagaaag

SEQ ID NO: 4894 - DNA, 6566 bp, Sorghum bicolor
atagataatgaaatattcctcgtcttgctcctacctctattagaagtacgagatctcaaggtgactatccttaggctggtaactatacctggccttgtttagttcactcaaaaactatttttttttaagattttctgtcacatcgaatcttgcggcacatgcatggaacattaaatatagatgaaaacaaaaactaattgcataatttgtctgtaaatcgcgagacaaatttttaagcctagttactctatgattgaacaatatttgtcaaataaaaatgaaagtgctacagtttcaaaatccaaaaactttttggacctaaataaagccctaacaaaattaacatgaaagcttttaaaatttactcaaatctttgtattctacgtcctccactgtccacgatcacaaggccaacaacgccttctctatggccttgttcacttccattcaaaaacctaaaatttttcaagattctccgtcacatcaaatttttagacgcatgcatggagtactaaatataggccttgtttagttcaccccaaaaatcaaaaagttttcaagattctctgtcaaatcgaatctttcggcacatgcatgaagcattagataaagacgaaaataaaaactaattgcacagtttaactgtaaatcatgagacggatcttttaatcctagttagtccatgattggataatatttaccacaaacaaacgaaagtgctacagtagcgaaatccaaaatcttttcgcatctaaacaaggccatagacgaaaataaaaactaattacacagtttggttgaaatttacgagacgaatcttctgagcgcggcctttttcacattgacctgtttagaatgtgtacttttatccatagcttatcagcaaaataaagaagacgacatctaggcggtccataagatctaatacgtagtacagattttcacaagctaatacatgcatataatgaagtattctttcttatccctcgtagctctattagaagcatgagatctcaattagaataacaaggtcactatatgtaacaaaatgtacatagccaaacacaattttatcaaatacggtttcgtgcatagaataacctaacatcgagaccctacctttactttgactaggccttgtttagttgaggaggtgaatttttttgacacagtagcattttcgtttttatttagcaattattatcaatcatgtactaactagcctcaaaagtcgtctcgcaaattacaagtaaattgtgtaattattatttttatatctatatttaatatttcatgcatgtattacaatattcgatgtgacgagaaattttaaaaaattaggttttggagtaaactaaacaaggccttaaactatgctacataagatctagtactgactaaaactaatataaaaaactaatcagatttatagttgtaacgacaatactttggttctgttcgcttgattttatccgttgaatctgctagccaatagccattcaacaatatttttcgctcctaacaaatcaacggatagtactttttatcggacagtactttgaccttgacaatctttcacattcttttctcaagcaggaaaaggcgtatagcatagcataaaagcttttaaaaaatttctcaaatctttgtatactctgcatcctccacaaccacaatgccaacaacggcttctctattcttggggagggagggagaaaaacgtacgaacacaaacaaaagcatacgtacagtagtgtctactgtagctgctcattgtccgtacgtcgtgggccgtgcctacgcggcgcttctcactgacatctgggcccaagaaggcgcacagcaggtggacccactcgccagtgggccaagtcacgggaagcacgtccatccgggtcagccttttttcccgtcagagctcatcagactaaaaaaattaaaggcacgtcctttcccttcttccttctctcgcacactccactccactccactgctcccctctcctccttcaaatcctctcctcgcaccacccaatgacaaggagagagagagagaagccgaccaccgccgccgcctccgcctccgactccgccatggacaagatcgccgccacggccttcgcccttctcctctgcctctgcttctcctccacgcccgccgccatggccctcaccccggacggtacgtctgcttgctgcatttccttccgccagccccgcgacgctattgctgtcgtctcgcttgccgagtgttcagtgctgacccgctgtttcttgtttgcttgcttggttgcttccaggcgaggcgttgctggagctcaagctggccttcaacgccaccgtgcagcgtctcaccagctggcggcccagtgaccctaacccctgcggttgggagggcatctcctgctccgttcccgacctcagggtccaatccatgtccgttcctcctcgcctcatcctgcttattgctcttcccatttctagcttccatattatcttaacagtacatctcccccttttatttttctttctctctgtcttttctttttctttttcttctgtgcctcggttatttgaatcagatgttcccccaaatgtgtgctcatggctcggttaccgacgccttcttcttggattccttgccccctgcttttgctttcctttgccactgatgaatataacaacaataacaataatgcgccatgcgcgtgcgtgctcttctctgtgcagaaacctcccctacatgcagctcgggggcatcatttcgcccagcatcgggaggctcgacaagctgcagagactgtaagacttgtttgaaagatttctaggaccaaatgttttttcttcactgtttttcttagatttagaagtattgtattttcctgaataaaaaggcagccatatctgtgataccaactgcgttgtctttttctttttgtgtgttgcctctgaatgtagccttttcccttttcagagctctgcaccagaacagcttgcacggcccaatccctgcagagatcaagaactgcaccgagctcagggcaatgtgagatactactagtatgatttattatttactactagtattagaatagtccagtgttgccgatttgttcagcagagtgttcaaatgcttgcttcttttttattattattatttaactatgtgtgtatgttcagttacctgagagccaactacctgcaaggaggcatcccttcagagattggcgagctcttgcacctcacaatcttgtatggtccttcacattctcattgcctgcttgtatttaattttacagttttattattgttttttaactaaaaaatgtgttcgaattgcagggacctatcaagcaatctgttgaggggcacaataccggcctcgattggaagtcttactcaccttcgctttctgtaagttttcgtgtgccattttcgtattcccttgttggaaacgcacaatgctgaactgctgatgatgtaaaagtaaaaaaactgatgagagggcacgctcttaccatgcatctcccaggaacctgtctacaaatttcttctccggagagatcccaaatgttggtgtcctcggaaccttcaaaagcagctcgtaagctcatttgtcccttctttacctgcgtgcttctagttatgatgttggatagctgtatttattgttgttgtgcatttgttcacgtgatgcaggttcgttggaaatctggagctttgtggcttgtccatccagaaggcttgccgtggaacactcggctttcctgctgtgctgccacactccgatccgctctcttcagctggcaagtcttccatttctattctatcatagtgttgaactctttttttttcacaattttggtgcacgtgcaatgtttgtgtcactgactggcggagctatttgtttctaattcaatcaggcgtttctccaatcaataacaacaagacatcacactttctgaatggcatcgtgatcggctcaatgtcaaccttggctcttgccttgatagctgtactcggattcctatgggtttgcttgctgtccaggaaaaagagcattggtggaaactatgtaaagatggacaagcaaaccgttcctgatggtaatgaattggcaccatttcctactgtttccacaacaacaaaaaagacaatgccaattacagccactaaccactatttttacatacgatcctgtcatcatttaggtgcaaagcttgtgacataccagtggaaccttccatattcgtcaagtgagattattagaaggttggagctgcttgatgaagaagatgtggttggctgtgggggatttggcacagtgtacaaaatggtgatggatgatggcacgtcatttgccgtcaagaggatcgacctcagccgcgaaagtcgtgacaggaccttcgagaaggagcttgagattctgggcagcatcaggcacataaatcttgtcaatttgcgaggctactgcaggctcgccacagcaaagctactcatatacgattttgttgaactgggcagcttggattgctaccttcatggtaaggatgcctacattctcgcatctctaggcatgaccatgatcacaattttttacaccagtgtaatgccttcttacctgatgcttacatgatgtggtgcctacggcaggagatgaacaagaggaccagccattgaactggaacgcgcgcatgaaaatcgcccttgggtcggctcgaggtctggcatatctccaccatgattgctcgcctgggattgtgcatagggacatcaaggccagtaacatcctgctagatagaagcttggagcctcgtgtctctgattttggccttgcaaggctgcttgtagacaatgctgcccatgttaccactgtcgtggcgggcacctttggatacctagcaccaggtatatctcttatcttgctagttggatgatatccttgtgatttctacgctgtcaaaaagacatctagtagttatacagtaggaattaagttttacttgtctggaatataagactgcaaacacaccttgtcaccttgtagggcaaagctaccaacagcatgaagttaaacaagaacagtaaaaaatgtttagtaggaagttgtaattcatagacatgtatttcaagacataatgttgagcagctccagttgatgaaaactgaaactggttggttactttgactttggtggcagagtacttgcaaaatgggcatgctactgaaaaatcagacgtgtatagctttggagtgcttttgctggagctggtgaccggaaagaggccaaccgactcatgcttcatcaagaagggactgaacattgttggctgggtaactaagcagtgttcttttttttttcttctttaccttttctaccttaaaaaaaagtagtaatgagtaagagtcatgtgaaattctgaaaatccattactgcttctgcagctgaacaccctaactggggagcaccggttggaggatatcatcgatgagcaatgcggtgacgtggaggtggaagccgtggaagccatcctggacatcgcggcgatgtgcaccgacgcagacccagggcagcggccatcgatgagtgccgtgctgaagatgctggaggaggagatcctgtccccctgcatgagcgagctgtgctacgagcagcacctggagctctgagctgagaggaggaagcctgactatgatgctagtagctgctgctcaagcgcgtgcatgcatgaatgatggatgagatgagactgagtaggaagcaaaagttttgtagatacaatggtgatgctgaaccgtgtagtgtaggtgtttatgtgctggctggacaagtgcagattctctcatcttcctttttttgtgctcagcctcagctcaagaaagtcaaagtggttcttggcacagaaccaacaatctaatcggcatgttctgttgtacatagatcttctctccttttttttttggttcttttttgccttttattttcctcagttttcttttgtggcgcctttatctttgtaccggtaattttctgactagattgtctgcactgttgtggctgcgatgcaaatttggcctgtttggagtatcacatattcacatgtatcacataaaacatagttcaggagaaaaatcccgtgttctaatcaggagaaaaaacagcaggtggcaggattatgagcatcttggcttggcaagagtgctgtgctctagggccgtatctgtagatgagctgggagacaatggagataaataaaacggtctgtgaacgaaggattgggtgtggctccagttcacaaatactgatacacgagttggcaccggaaggaacaaaactatagcacaatgctccaagaaaggaaggaagaattagagtgcaacagctgagcagcattgacatctgagaatgaagcatcatcgatagcagagagagcaggacaaaacaacaaatggcgctctgcatctgtatgcagcttttttatatgcgtgtgtataactacccgacacatcgatcatcgcggaatgtgcatcgtatggatgtatttgtgtacccttgtggcgcgtgac

SEQ ID NO: 4895 - DNA, 3252 bp, Sorghum bicolor
ttccatatatatatatatatatatatatacgcgcatccaagagttaacatttatcgcactactacacaaaaacgattttgcgagatgtgccccttttattaacggaggcgggcataaaatctaatcgccatggtcaatgcctacgattaacggaggcagacttttttatttaccgagtgcccgcctcaaaatatggatttacggaggcgaacgccttaagataaccacctctaaaaatagtctatttatggaagcagtcgtcttaagaagcctgcctccataaatcaattttcagaggcggaaacactataataaggtccacctcttaaaaggctgaggcccatctagctcaggcgaggcccgctagcgatttcaattataaatatgggcacttagggtttttctctttcactccacttcctcacccagtcacccctccgaaacccagtgacgctatcctcattaccttcgtctcccaagatgaaccatgcccttctccctccgcgcccctcctctccgagcccttctccctcgagactggtggccctcctccctctccagcacgcccttctccctcacttgtgggagccacgggagtcggcgccatccgagcttgtgcgtgcccaaatctaggcggtcttggctccctcctccctctcattcggcacaacagcggtgttatgcagggctactcgatccggccctccagggcagcggccgtgtgcgcgggccctcccatgcgggtgagtgacggacacggtagacgaggcctccttcctcgaccctgtggttctcctagcagcagctctctagatctagccgtgggcagctccatcgggcggttcaaggccagatccctacgatgggaggccggatgttgttggtgcatgtgttccaggttctggtgagcagctacagcgatgacacccgtggatgggcttggcgggcctatccacggttttctctttttatgtatatatgtatatgttttctatgtttgatttacggaggcggacaaagcaaccgcctccataggtcaggaattaaccgaggccttcctttggagttggttgcctttacctgcctccaaaaataaaatgcaaccggctctattaagtttattgtagatttagaagcaagtgagatcccaaaccagggagagaaaacctatcataggtaactaaatatcttattcaaataatatccccatggttttctcatcctagaaaaagtcaatgggatttgagtttccaaattagggccttgtttagttcaccctgaaatccaaaaagttttcaagattccctgtcacatcaaatcttgtggcacatgcatgaagcattaaatatagacaaaaacaaaaactaattacacagtttgtctgtaaatcgcgagacgaatcttttgatcctagttagttcataattgaacaatatttgtcaaataaaaataaaagtgctacagtagcgaaatccgaaattttttcggaactaaacaaggcctaggagtaagatatatctaaccattgaagataggtcaagcctatagtgccaactcatttaggccttattttagatattgttggattcactttaatttatgtgtgttagggtggaacccatatagatggtgaacataccttggcaatatgtaactgtatagttgcgtgccggcactagggtttgaaaacgttgcccggtcagtattgcggcgggttgcccaggggctgtcctatacccgtgctcgtgggctaaggccgtgcccgatccgttgggcctgggccgtaacataggtgaggtattggcccatggctccacagttcatgctggctggctgacagcatggccccacagcgcttcgagcagcatacaatccccaccgcaaattggccgccttccctcccgtctcctatctgatctgtctacctatttatttattacaaataaataaatactcctccaaaaagaaaaagaagaagaaaaaaacgccacgccacgccagggccggccagacagattcttctccgcctccgcctccgcctccgcctccgcgtgacttagacttggggtgtcgtcgccgagttttctccggcggagggcggcgcgaccggcaaccagcgtgagcgcgaccactcggcgacatgactcatatccttcctaaaccccgattagatctgactctctcttccctctaatctatctttttcgattctgttattgccctgttcctccttccttaactcgctcgcccgcacgcggcaaccagcgtgaccgcgaccgtgagcgcgcggcggcgcggaagcccaacgccaagggctctcaggacgggctcaccccggagcagcgccgcgagaggtgcgcttagttgaatctattttcttctgttcgattcgattcgatccttctccagatctcggttgcttggcgctgaccctgccccgatccgcttgccggacggacggatctttcttgccagggacaagaaggcgctggaggagaaggcggccaagaaggcgcagcaggcagcggccggcggcaccgggacctccaccgacaacaacaacaacaacaacaagaataaggcaggtggcaagaagtaggcgcccccgtccacgcgcgcgccgccacctctgtacgattatcgatcgatgcctttagcttgtaaacctgttcgcatccacctagatgcgatgcttgttgggtcataaactcgtcttctgttactctgatgatatccacatttggtgatgagaataatacattgtgttctgctctttctatggctttctgttctcttctttgactgcctgtcctatcgatggatggaaaatcctcttaataactagtttagaggatgaattaggatgtgatgaaggagcttttgcttgctattctgaactattagaatatgaaagctgtcgaaatgggaatcctcttgtatttcagttattaccaagctaatatgtactactcccgccctcccaaaataagtgcacatcttacaccgatgagtcgatcaatctttaagtagtttgaccgttagtaatgtttatgatacacacacacacacacaaatagtaatgtttatgataacaaacaaatagtgcatcattggattaatcacatcatatattttcatcatatataaacctgtttattagagatacaattgttaataatattttctataaaatttgggacggagggagtactttcctatcgtacaacagcgtttgatggctcaacacatgta

SEQ ID NO: 4896 - DNA, 9713 bp, Sorghum bicolor
tcaaatctttagacgtatgcatataacattaaatatagataaaaataactaattatatagtttacatataatttacgagacaatttttttgaacctaattagtctgtggttaaacaataattattaaatttataaaaaggctacattgtaaaaatttaaatactttttacatagtattgctctagaattgtatcttttggacccggagagtatatactacataccgattgtcatgtgcttgccagtaccaattacgagagcaagctacagttggctgcaagttccaacgtttcattcatccttgggccttccaaaaattttaaaataaaaaattagattccccgtcacatcaaattttacgccgtatgcatagatcattaaatatagataaaagtaataactgattacacagtttgtctgtaatttacgagacgaatcttttaagcctagttaatctataattagacaatatttgtcaatacaaatgaaagtactgtccattttgtaaaaaaaaataaaactaaatgggccttggatggatccttatttttccttcctgacaaataaattactttctccgtccccattcttttctagtatcaataaagaaaaatagtacgtataccactataataacatttctagaacacatcattagtagtataacgaagaagaaaagactagcgtgccttacgtttttttcgatcacgcaaaaaatttacacatctttatattaagatagaaaaaaagtacaatacaacaccccatattgcgacggatccacgcttggcgagctccgacggcccaccatctccccgcgtccgcgctcgcaacccatcgtctcctcccatgcggctatgctggatacgatggtgctgtcggatctagtgatggcggcaccagatccacctctaggtgagcctcctcctggatctactatctagggttacgacgagctcttcccttctcttttccaactctggcaagcttagaaagtaaaaggggtttagggaggaagatatgtcaagcggtggggatagttgatgggtgatttaggggagctagcagtgtttggactgccagatcgaggtgggagaggcttgttggagctggagaagatggaggcggatgagcttggcggagcaagagaagatggaggtggtgggataagggaaagaggtcggttgcaaccctagcgcacgggcggtggccggcggtgggggcgagggtgcggagttagagaataaaagatctgtttgttttcatcttttttagcaatcaaaataatatttttctaaattaaagtgcacatgtagaaattgggtttctgtacgcacacgctctagtaaagtttttttatataaaacactagcaatattttataaaaagaaacattagcaaaatttatatttttaaataaaatatacatatattgatattttgggttaaaattaataacgtttgactttttcttggaaaacgacgacacttgtgtatgggagtggtcatcagccagccagccgtgagcatatccaaggttgcagacggagacggggaggggttctcttcttgtgttgtggctcccctccactgcccgcactccctcgtgtttctcgcggcagcaacagcaaacaaggacctcctcctcgagattgattaatgactaatgaggggaaggcgacagcactattctcataccaataccatttgtagtaagtaagtaaataaataaataaatagttgtaataattgattcgtcttgcttgttcttatcatcatcctctgttatgttgtgttggagctccagctgcagagctcgaggactccctccctctctttggtgtttggtctcgtcgtcgtgcttctgtgtgtggtgtctggctcggctctgcagccagccatgattgttgttcccacccccacccccacccaacgaaacagaacaacaacaggacgagagagagagagagagagagagagcagctgccctgccctgccctgccatttctctctccctccctcgtcaatcaattcctcacaacccaacagaaccacaggagaacagcctgctcggagctcggagtcgagttgagaagaagaagaagaattgaaaacaagacagtttgcagcagcctctgggtcgtctcctcgggctccggccggcgacccctcgcccccgacgaggaagcagtgtgctgcattgccattgcatcaggcgacctagaggtacggcaatggcaatactagccatccatgcatctgtctgtttattctgctgctgcttgctctcatcgttatggttctctatagctctccctcctccctccctctctgagagtcagacagacgggactcctagtcattcattcagagtctagcaagcaagcaaggaatgactaggagaaggagtatgtggatcgatccatctatatattcttgcatcataagatagattacatagagatagagatggattccgatccgtgaatccaaagtccagtaacaagcacaagcacctgattttatttacttgctgctgatgttccctttgcgtaatggatggcgggcgttgcgtgcggcggcaagccatccaagccaagaaggtgatttggccatttcatttgtgtgtgggggggcttgctttgcttgcggtgcgggagaatttcttaattaacgaatgaatgcaagggaaggcaaggcaaaggcaactaggcatggcggtggcggcccggttggattggattggaatcccgtaggcagcaggcgtagcctatcctccattcctcctccgttcctcctccgttcatcagtttctcccccaccccccaggcctcgcctcgcctgtcgtctcctctgcattctcaatgtcttgcttccttccttgtccaacactgcactccactccaatcccatcatccatctcaagccaaagcaatgccttctccacttgtactcctctctccttctctcatctcacaaggcagggcatgctttgctgttgcaacaccatcttctcgttagtattagtatcagcaaagcaagcaccaatcagccttccgagcaccaatcagtctctctctctctctctcacatacccctccttacaaatccatctatccatagcacaggcacctgctgattaatccggggttgaggacgagaggggaccttccacattcatgctccccataataagccaatagcaaagcattcaagaaccaccgcaccggactgatttcccttcctctgccttcccttattgtctcggtcagttctttcttcttcttcttctctcccctttcctgtccttttccctttcttcctccccccctcttctcttgctgctcttaattggttaccaaataccaatggccatggatttgatgccgcctccagttactgtatttttctcttactagtttctgccaggcagcacgcgaccttttttgtttttcttcttctgattatggtgaaagaaaaactagcaagcaaaagcaacccttttcttttcttgtcctctcacctttttctcctacctgcacacgttttctttctttctttctttccacatcgttccctcccttaatcaattttactcctatatctatctatgaaataatttctctctcgcatagttttattattactactagtattatttactttattattaaaagattagatactgtaatttcattccatggccacaaaacttgtcttcatttcctgctgtctattcatctatgacaatgagataactacctgcctgtaataaatgaatgcgactttctttggctttatgtttcctcctcctcgtcgcctcattctcacttcgatgtttcttaagcaggaagcagttaatggtccagaggaggggccataacctccagccgtttcagtttttgacttgagagttgcttgggtttcctcaacaaacacactggtggagtgccgtgccatacgcagacaactaacttagccctgccaaataaaacaagagacggagcttcctgtaatcctgcacctatggtgatagcatccggagccgttgacaggagccacctgtccccgtttgttcccctgtcagaatcctcatcttcatcattcttctcccaggatctcgtccccactgaggttagcaacaaataataataattatgcaaaatcagtacatctacatgctttccttacctccctcccatgtcttccttacgcagaggcaagttggattctggaaatcatcagggtcaatggtccatcacaaaggtgatgcttcacttttttaaaaaaatattcgtggctgctatttcatttcatatgattgttacttcttgcatgatgcaaactgtcagttaggcctttcttttcttttttcctccctctcttatttcctcatgtattgacccttgcaaaatgtatggacctttctatacttgctgttggtagttagtggagttattgtaccttaaataaattaaatctcctaaaatgatgcatacctaacttgccctgtccagctcgtcctgcacataccaactgataagctcattattcatgtttttttttaacaaattgtgcggggatggggagatattctgctcgattctcgactaatttttctttgcgccttatttattaataactaactgactaaaaccagaaacttagctgctctgctgtatcgttttagttcaccgtttctcttgccaggaaatccccatatggactgctagatgcatgccacctaggttgcctaatgcatcagcatccagtttttagtaagcattttggatgcagttgggcagggaatgagcctggccatcccttattcctggaatgtttatacaacttctgctcaagaccattaggtaggagttagttgaatggttcagtgagcacagctagcaattaaatgccttgatcaacatatcgtcggactcatttgttgaaggctgtaacatgacaatagattgaacaactcttcaggaactgagtatatttgttcatgttcattaatgtcagggagcgagcctattttcacttctccacttgataaggtccatccgatgggctcaagtcctgcaggtggtctggaacatcagcaaggtcaagcctttaaggggcagatgggcatgcttaaccttggtaatttggtgggtcaacaagaaaatgctcctggcataccatcgatttcttgggacgatgtcctcagtagctccaggtccagtcttggcttgtctactggagggacagcttttgttggaccaactagtgctgatcaacatgtgcatgactatggagactgcccttcatccagctcctacaccgaagtcttcagtagcaaatgtgagttcccctttgcattttttttcaagaaactaatacttgctaggaattggaaagctggtaccatcactattgcggcatgtatcatttcgtctgaaatgtgctattacccagtttctttatttaccttgacaatgtttcccccccttgcctcaacgctgcagcagcaagattggtggcaagtggcgtttatggtcaatcagctgatgcaaatggttctggttgtgagggagatgaacctctagggtccatgaaagaattggaagctcaaactattggagatctccttcctgatgacgatgacttgatatcggggattatagatggcttcgaatacactggcttgtctaacaaggatgatgctgatgaagatatattctacactggaggaggtttggagctagagcatgatgattccaacaatgtcgacaaatttcgtgaagtgtccttcaaaagtcaactttctggcgatgtcaacgaggtaatattacttctgaaaattctttgtgaaattcgagttccaaactattctgacgatcttctttttattttgggttatagatctacaaggctcctacaagctgcaataagaaatttgtagaattctataataccagagcagcacaagaaacactgaatgacctcaacaagggtgacatgtcatgctcacaaatcaaggttgagcatagctattctggaggagcaggatcttggtaattaacttggctggcatcatttcaccatttccagtaggatctcataacgatgtcatacatacactgtatactatcatcttcatttttttcctcgaacactatcatctttcttcattacatgggactaatacgatagcagattttccaaagatattgcaagtagtaatatatggatagtgggacaaaaaaaggtaatcaagtgcttataggtgtaagtaaaacaaaatgtgcttcacattttcacggtttctcttgtagcctttgtggtgcttccatcacggtaattcgagaccaacttgcacaaatccttttaacaatagaatttgcatgagaacaaaacaaatagccaataactagtacttttatcatgcctaatggttgagtaacgtacaacttcaacggaattctaaacttccattcccatgaattctggttggcaaattatgaaattatactatagagccaccaaaccctatcagtttatgtggtgaagtaacatgttttctctgtgcttaccagcttcacagagcaatgttctggagaacagaagcaaaatgccgtacctcaccaacttaagaactctccacttgggaccattggtatgtaacatgagttgttgtcatttttaacattattcgccccttcctactattcatacattttgagcccgcactttcttttcacatgtcaaacagggaagttagaccctaaaagttgggagggcagcactgttcgtaatttatattctccagttagaccacaacacgataaagcacaacatggcttctctgtgaatgctcctcagaagttgtcatcgcctatcagaattgaatctacacgacagcacagtaatcaaactgctcttggtgaacctagtggatcgcttggtcatggcaactttggaggtggactgcaagccttccacccacactcactgccagagtatcataatggtatttgcaatggctctaactccatgacattaaatgcaaggaattctaacttcagattaactgaaggaatggactacaataatcacaaagttgaccacagtgaccttcatggtcattcctctgatcaaaatgaaggtaaaatttcttcggcaaactacttataatttgtcttttcaatgctttgcttaactgcttcacctgtttagcatggatttgtaaaattggtgctcttttttatttccactggatttagttacacatatgtaatgttgccaagcacgggtatatgggtacaaacattgatgtgttagctgatgttatacttatgggttactgccgattagattttgttatgctcctttcttttattctgtttcaaagttcattgttagtttgtttgtttgttttgcagcatttagagctactggaattggaagttgcccccttcatggacatcactatacttggagtaactcaaatggatttcctcaaagcccctctgctccaatgctgtggtctaactttcagcaaccagtgcatgtgaattgttaccctgttatgcctcctcacatgcggcgcactgctgcccatcctatggaccaacatcacttgggttcagctccaaacagtgttggtggtttcgcaaatgcacattcttttcatccagggtcccttgaaagtgtagggtttcctggcagccctcagctgtatccagatctctctgtatttgcatctgccagaggaaattacagggagaccatgttctcccccgtaagtgctgggtttccatcaattcagcaaatttttcatgcgaccaacggaaggaatcctatggtgcatgtttccacatcatatgatgccactaatgatcggataaggagccgcaggcatgatggaaatgctgcccagtctgaaaacaagaagcagtttgagctggaccttgaccgcatagctaagggtgaagattcgcgcaccacactgatgataaaaaacattcctaacaagtatgtttacaccttatgccaacttttgattccatacacccaggttattgtatcaggttggccttttttgttcttttgacttatagttgatgccatcaacaggtacaactgtaagctgcttttggctgtcattgatgagaatcaccgaggaacctatgatttcatctaccttccaattgattttaaggtatgttattctttttcccccaaagtgggaaggttggaacttgtagtgagattcatagggtctgactcttgctgtgtctgctttcctcagaacaaatgtaacgttggctacgctttcatcaatatgacagatccacagcacataattccattttacaaggtatgttgatgtgcccatgccttcataactcacggtaatgggaaatatatccagtttaactcctgggttgaatatgataattagtaactaaagttgataatttttttcagacattcaacggcaagaaatgggagaagttcaacagtgagaaagtggcatcacttgcatatgccagaatccagggaaggaatgctttgattgctcattttcagaattcgagcctgatgaacgaagagaaatggtgccgccctatgcttttccacaaagatggtccacatgcaggagatcaggtacgtgtaatattctctcgttgtcgtcactgtgtaccttttccacaaaatttgctgtgttgtgtaatgactgacagagttgcacacgttcttatcaggagccattccctgtgggtagcaatgtccgttctcggtctgggagaaacagaccactcactggttcagagactactaaagagggaagtccatcaacctctcctaactaaagagaagctggctcccaatccaactgaggacaggcggtatttgcccactaactggaggctgaagagcctgtaataaatcatccccagttttgcttttgttgcttttttttttttttgtcctcgtcagcaaggcagtgacttgttgagtgtgacaattaatgagaattctgctctgcatgagcctgctgaagatttcaccctaaattaccttggttttgccctaccgttgagcaagctatgtgtcaacggcaacaggtatgtagaagagctgaagtggtggagagggagaggtgtgtgtttcaggcgggtgaaattgaagttgtacagttgaactcaccaggattggaaatggtcatcaatttgagttgtttttcttagggttcatcttgctatgtttgatctcatttatgtgcacatcacgtgttcactcgcaaatgtttggatgccttgtctttgtgaaacttctgcagtccccagatgatcctccttgtttgaatggctgcctgccactgcgtccatcatctagtaaactatacttgaacaaacgattgtaaagatctcccaaaacaaacccttttctgagtccagagcggactgcaatatctcagggcccgaaatgactcaggacctctacttgtacgagacagcaaaatgtgataggatgtggtactcaaatcaaatcagataaaaacacgagcataagagtacgacatagaattatagtcatataggcagaaattcaattcaattcaattctacgcccaatgggtctgacgacttaatagttttaagggtcttggatgaacgcttagcatccaggaagcagcaatcggtctcccaaaccgaaccaaa

SEQ ID NO: 4897 - DNA, 5508 bp, Sorghum bicolor
ttctccatggttgatccatagtaataatttttttttcttgtttttcattcccttttggtgcaggaggatgagctagggttgccgacagtaccacaagcttccattcgtacctagttaaacagaatcacgtttcttggagtgaatgatgtaaagagagtcgtatgatatctacaattggatgtaaaatgttcttatgtaccgcaccactgatttttttgccacttcacttgtggacggtgtaaatgtgattgaattgaattggttgggacataataagatcctccttgtatttggtggtggagggctgtgctctgccctacatggttgtacatacatatgaggatctgttggcatccattttgcttttcatgctgtgcattgtctgcactgattgggtttagcgaagtacaatatgatttgttgtacatgtacagcatatgacaatgcctgttcaaaagtttagcatcatctatatctgtcaatgataaaatagcacagggctctgccggcctagttctgcaagggcaaggattgtaggttgcacagtgtgccctctcctcacacacgaacgctccctacatacagatacagtagtagcagagatgctgttatttgtttggttcgcactcacaggcctttatttgctttcatggcgacagtactagctttgtaacaatgataacgtgcattgcagcccttcaatgctggtcatagtgaattcaagaacaggacatgtttgagtgtcatgcctacagcatgaaccgttgcaacaactggactcgctaatcttgcggtttcagctaaacttcacattaccacaacctcgtaccctatgttggcaatatacatatagcaaacatatctggaaagctaatggtacaatccataaaggagctaggggagaaaacaaaaactagctatatttacatcttcttaagcaagcacaaatattcattgctcaaatgagtcgtgaaagttagacactcaatctagtcctgctctggctactttcattatactgctacatgggaaccaacgtatcaaaatttgcaaagtttcactcctgatttaagcctaataagatttagtgcatttagaaacagacaaagaataagaggacgatagaatcctcgatgttcaaatagacctgataattgagattgagtttctctctctctctctatactactccctctattgtaaattataagacattttaaaattttaaattgtttgctatacccttagatatatactatgtctaaatacatacaataataacatacctagaaaagtaaaaatgtcttatagtttgaaacacaaggtactagcctggtcgcttaagcttatctgtcgaatatgtcaatcatttggcagtgtttttttctcataatcagcgaacagtactttcagctatgactttttagcacaactaatagagccatatgtgtcaatatagtatcggtgcaccaaatatctaactgaggctagagccttatttagttttcaaaattttttaagattcttcgtcacatcaaatcttacggcatatgtatggagcattaaatataaaataaaaaataactaatgcataatttacttgtaatttgcgaaatgaattttttgagtctagttagttcatggctggacgataattaccaaatacaaacgaaattgctacagtagccaaacataaaatttttcagaaactaaacaaagcctaggttgaaaaaaagaatgtcgaaaggacgcatttggatcaggcagaatggctgataagccatgactgaaagtattgttcactgatttgatgttaaagaaaaatacggtcgaatgacttacagattccacagtcaagcaaatagggtagcacaatagttagaactgcaaggccccaaacataatttccatgatatgtgggggttcatatgtaagagatatttttggctatcttcccatttggcctttcttatctatccgtcggcaacggagtggagtgcagagtctcttccccatcccattcccatctcctcctcctcctaaaccctcctcctctccgtctcctccaatggcggcggcggctgccacctccttcgccaccctcgtaagccgaggcgccccctcctccgcctcctctttgtccaccatcttccaacccttcaatcacctgacggaccctctcgtgttgcttgcaggccgtcgcgcgctcggcggggcagcggtccctcctcgcctccaaggccgccccctcgccgctcctctccctccgcagcgccggcctcccctcgcaggccgtctccttctccgggggcctcgcggcgtcgacctcccacagccgagcgcgcttcgcaacatccgccagcgccgagcccaaggtaccatctttaagctgctgtgttccttctctctctctctctctctctctctctctctctctctctctctctctctctctctctctctctcttctttaaataatctatagtatctatctatctatctatagcggctgaagtggataccgggcctgcggtaaagtttgcatctttttccattctactattctattttacaaaggggagggaggtttttcctttaatataaggaggctaatttgtaatcctggcaacttagacagcttttggacattccatctgccttagatgtcaaccttcccgctatccactttattaaattggacttactcctttagttcaatgggcatgctaaattaaagtcaccactaaaatttctggggacacaagttctaattgcagcacatcatcaaggatttgttaagataaaacgattgaatcttcagacactaggaggccttgagtggcctgtagttgtcagcattatacccacattagccattgcttgtgcgaggatgcagatgctcaattgtatttaactcaaactgtgggttaggcaattttgtggttgcatccagttaatatatgcaaaatactcctacctatgttacctcagtgtgtaattatggcaggatacctatgttgatttgtctattgtgcctcttgcaggaagcagaccttcagtctaaaatcacaaacaaggtgtactttgacataagcattgggaaccctgtggggaagaatgttgggaggattgtcatcggcctatatggggatgatgttccacaaacagcggagaacttccgtgctctttgcactggtacgagggattgctggactaccattttgcttgttgtgcagtcttattagtttgagtattgccttgtccagaagagaaacataacaaggtccacttttgcaggagagaaagggtttggatacaagggatccagtttccaccgtgttatcagcgacttcatgattcagggcggagattttgacaagggcaacgtatgtgttcactggctatcactatgcacttggatatatatttttttccgctgtgcatattcagtgcagagaaattaaagaatatctgcatgctaatgtgctgatatgttctatcaaaagaatggatgattttttagcttactttttgttctacaagtgtaactgttttatcttattgattattctgctaagtattctcgttttgggattagtgaattgaatttacacaagttcagagtggtttatgccagacatttaattggtgaacaaaaataggaattatccaactcctacataggtttcttgatagtctactagttttgtgtcatacagtcacctttgtgacgctgctaaaatcttgtcatagtacattatgtccatgatttatttgtctttatacatacatgcattttgcaattagtatcttaactcataaaattagaagtgattggcatctagtcttgttttccaaacttatgcacacattttccatgtgtgactttatgaggtccaactggcagtatatggttgggacactgaattctttgtgtacagtctggcagattggtttttaaaagactacataaaagattggttttgtgcctgaacagttgaacaaagagaaactgaattggaggatgcagctttcaagttttgcatgtgattaactagaagttacatttgcagggtaccggtgggaaaagcatatatggacgcaccttcaaagatgagaacttcaaatgtatgctctacatctgaaacagtagtgatgtgctgtgtggtttctaaccatgctaatcctgatggcatgctgttttcatgctttagtggttcacactggacctggagtggtcagcatggctaatgctggaccgaacaccaacggcagccagtttttcatttgcactgtcaaggtaatctcgtaccttgtttaactaccagaaaagtggacctttttgttgcctctgctacttcgacaatttatgtttcaaccagtctctcatgtactagctccaaaactaacctgcaactggtatgactggtgccttggatgcagacaccttggttggacggaaggcatgttgtgtttggccaggtcctggaagggatggacatcgtaaagttgatcgagtcacaggagactgacagaggtgaccgcccgaagaagaaagtagtcatcagcgagtgtggggagcttccagtggtttaagtgttgctcatctgttgtccgtcttacctcggatggatggtgatatctccccctgagtttactggttctgatgctatgaccttgtcttgctatctctatgctagttatagagatattcaagtaagatcccaaatctgaggcatactgttgctgctcggctggaataaatgtgctactttccccttgcccagtttagggaaagggttttgttcacgaagtcaccctgtaaccttgtatgtttcatactcggaatgaaggttcagggaaatcatgatacaaaaatattctgttgcattgcatgcaagagctgttgatcgtccagagcaatgtatatggcctgtttggtttatgcccaaatttgccatacctaacttttggcaaactgtagcaaagtttagcaagaacatgagtctatgatgtgagggacggtgctaagaaaatacggtgtgtcatagttacagcaacgaactaaacacacttgacttgtgccatggcaagttgtgatcacgaaccaaataggccttaccccttacgtgcaaaccgataaagtcatgtggagtggcaatcattccaaggtattctactaacaaccagcacaacattacaaacttggtttcaccaaggcctgaactcacagtacactaccttcacatgtagagtgaatgggtgatgagtcatgcatgctgatttgtcaaggtgtgcatgaactgatggtgatgagtcatgctgatgtgtgaagcaatactgctcagcgtagcccaatttatctcaacaaaaaaacaaacaaacacacacgtatgccattacaaagttagcttcacaagcgtatgaataattcagtgacaatccttgacatgtaaagttgattttcatatgtgctgacaggaagctcaatgatctatttatacatcc

SEQ ID NO: 4898 - DNA, 5110 bp, Sorghum bicolor
cctactcctgtcactgcaacacctaactcctgttactatgcgtacgaccgggtcagaaggaatgggtgatatcaaatcctgagtactgcagccacgaagctcatcagcactcctgaatacaggttaaggaaagagatctcgggagatatccttgacatagaacatggctagacgtcaagtctacaatcaggcatggctcgacgagcaacaggagcggccacgccgcaagcacgatcaattacagtatcagagatggaccaccttgcctcctatacgacaccatgactttacgacacgaacacatgtattccttcactccccttggattataaaaggagaggaagagcctcattcggaggacaaacctctactacaagcacttggtgcggaataatacaaactttcttctcacaatggagtccagacactgacacctccatttgagcatacgagtgcacctagggtggtagccccccgagcctttaatcacttttaaagggaacgggttagaggctgaaaccacccactttattgcattcgtttgggagcgaacatttaattcaatgatctttttttttctagattttatggggcccaccatgctttccccttttacttggcaaacggatcgctaacccaagatgtgtgatgaggacacgccaataacgtgcgaatattgtcccaatctttcacggtaaaaaccaaatggaaacatgcagctactagcgtgacaaacgacctaagtcagttatgctgattgcggcccacctctaactagtgttctagctctttgtggagtgtggtcaatgtaaacgtcaattcctctcgtaactaacttgaggttgttttctaactttgcagtccaaggaaaaatagaaagaaaagcgctggtatatactgaaggcagcttcttgtatataactaaaatacctttttccctcttgggtgcactagctatttgcagccagaggaagaggaacacatgacctcaccatcacaatcaaaattacttatttactggctagccgccatcgcatgtttgtatagcggcagcagaagaagccagagtgacgtactaagtctgggcattgcaccgtgtatgaatccttcaagtgttaattaggagttaggactgatcactagactaggcccaaaatctggtcaagcaaatagagtcaaattacttgacggagctgttgcaaccgatggagcgctcacacattattgcattcagcgaaatagatgcagtactttcatatatatgattggagccttggagatatttgtcacacgccatggagatcgaacgacgtatagacagcaatgtcatactatactactcgcgtgtgttgcgtagagtcagagagtacttgtgtaacttctatatttttctgttggcaaattcagtcctaatcccaattaaaatcggtaccgtaccatgtagaaaacccaaaagtagttctcgacagccagtatgtttatgtaacacacaaaatcaaactatttagccgtatgtgaagttgtgaacttattacttgaaaattagagcacatattgcaaattaattttgtctttacacatgcatgcatgcttttgtaagaaggaaagtttcagtagaacactcttgcttataaagacgaacaaaaagatcagtataggtcaagttccatcgcggcaatgcaatcgttaaagatgaataaacgaatcaataatgtaaaagaaggaaggcgctgtcatgtttagcttttctctgctttaccgaattaatggaagatgaagcgatcagttggtattttacattggtgtgctactctatcgtatcgtatcgtatatatatacacctgacaagaactagcttgatgctgctctggtttggtgtctaacaatatttgcagctagcacggcataatactgtcctaacaagacagtaagacacaactatatatatatagctacaagtacgtacgtctgatccactgagaagatagataatccaagccatgctggggatggaggcgaagaagccttacctgatcgccatcatcatacagcttatctacgccggcatgttcgtcgtctccaaggcagccttcgaccatggcatcaacaccttcgtcttcatcttctaccgaatggccgccgcctcgctcctcctgctgcctgtcgccattatcctccaaaggtaagcactaagcagtagaatgaagggttagcaaattgttttcgacagattattagacatatactatgtgaacccaggaagaatgtgcggtccatgtccttggtgctgcttctcaagctcttcttctatgccttgatcgggtatatatatatatataaatacatgcatcttcagaagttcagatccagcttatacatcttttgtgatgatggatgccaatggttaataacctgcaggaacacattcagcttgaacttgtacaacgtgagcatgaagtggacatcggcgacagtggcgtcggcatccagcaactccatgccggtcatcaccttctgcctcgcgctgctgctaaggatggaggcggtgaagctgcggagccgctccggcgtggccaagctcgccggcgtcgcgctctgcctcgccggagtcttcgtcctcgccttctacgccgggccggcgctgagccccgtgaatcgccaccgcgccttcgctgttgcgcaagcttcgaacaacaatcatcatcatccgagcagcaggatgacgtgggtgaaaggaacgttcttcatggtcctcgccaacgtcacatgggccctctggatcgtcctgcaggtacaacaaacgtatctctgattcctcctctctctactatttttttattttattttgtagagtagtatatacgtactagtgacatatatattgctagagtgagatttggggtatgattatatttgaacatcattttcagctaatgaagaatgcaatctttgctttcatattagcatgtgcattgacacctctacttaggcaaaaaccacaacttccaccttgttggcagttggcactaatttgttcagcgagcaactccagcagggctcctattcaagccccaatagctaaatatgggtgccaggcaaaatactactccagcagagcccctactccagaccccatatttggttgggcacccatatttctccctaagaccccattctcattggcccaacaggacaacccccatcctccatcgcgtgtgctagtcccagcgcgcgctccctctctctcttcccttgcatgtgcatgacacctacggtaaccggctccgtgctccaattgtgtccatgtccaaacgaagaagaaagaggaagaagaaaaagacaatgacgagtgggtcccttctgtcattatctctggaataggtttggaggcccaaatttggatgctactgttggagttgaagcaaaaaaattgagcccaaaaaataggggagtactcaaatcaaaagtaggggcctgtgattttggggctactgctggagttgctcttatcctaatccatttcacaaggcagtggtctccatctgcttctttcatccctttccacatgatggccgggacaatggagagagcaaattattatttgttaccttcagagagagatatataaatcacatatggttatatttgtatatgtgcagtcagcgttgctgaaagagtaccccaataagatgcttgtgacggtgacacaatgcgtcttcagcaccatgcagtcattcgtcgtggcagtggtggctgagagagacttctccaagtggaagctccgatttgacattagcttgctagccatcatttacacggtaatacataactattttattttcgtgtgttttgattttgtttcttacttctatatcttttttaaattataagttgttctaccttttcgagatacataataaaaataatgtatctaaacataatatatatatatatatatatatatatatatatatatatatatatatagctacgtagaaaaagctacggactttaaaaacctacactgacatataataatttgaaatggagggagcatttagttactaggatcaattaaggaaggctatggcccctgctgaaaattgccaacctccaccactgcttacgttacagtagacattatcgctgataattaattgcttcattttcacgctgcatggacgtaggcatggatcatatcacatcaaactgattgtggggtgatgacaggggtttgtggtaacaggagtgtcctactatcttcaggcatggtgtatggagatgaaaggccctgtctttctagcaatgtctaacccgctctgcttcatcttcaccatattctgctcctccttctttcttggagagattgttcatcttggcaggtaattatcatgtgtgtgtgtgtgtattaattggtgtttcaatgaatactcatttggttatatattctcattattttttccttgtatgtcagcatcttgggcggagctctgttggtcgcagggctttacagcgtgttgtggggtaaaagtaaggaaaccatggagtctgagggaacggaagagcagaaggacgcagccaaagcatcgtccatgcttgaacaagcgtgatgattatctacaacatgccacccttcaacgttcccttgctattttttttttccaaatgcatgcaaactaccgccgcgcactagattcattaactaattattgtgcttatcattccagctacatcgtcccaaacacgttctagacttgattaatcattcaaaaactatttgaaaggaacacaattcgttaacgtggaacaagagactttacacatgatgaacataaaaattgtacacctaaaagaaaatcacgcaacctaggtgtacaaaactttatacagaaggaacagaaagtttatagacctagagcaaatgatgtgtaattcattctatgatgattattgggtttcaattgggagaaggcaaattctgctaaacatcagctcactagctttgctactcccaaacaaatcacatataactagtgggctttactttggaacgaagaagcatgggccaaaatacccagccgactttctctgggccggccaagcagtcaag

SEQ ID NO: 4899 - DNA, 5056 bp, Sorghum bicolor
ggtcatatcaccgcggactcattataaaccgatagaaattagaggttaactatgaaattatattccattattaatctagtggtatttattcattaccataaataaataaatacatattagtatttgtttatctatgtttagacaaactcgagtagagtgagttaaggaaaagctagtagatttgtatttctttttgggacaaaaggagtaggcttcggtttgttataattctgcgctgtagaaataaagtgaggggaataaaactcaatcattttttaaataaacatgtactctatccactccaaattataagatgtttgattttttaaataaacatgtaaagatagctgaagttgtcaactctaactagcgatgtgaatggaggtcaattgtggcagccgcgcagtcacgaaaagttggttggaccgtaagcaaggaagaagaaagtgcacacaaatccgggggcgcatggccgccaccagccaactgatagcgcttcttctgtttcgccggcaagtcaatcgccgctaaaatacactgctcctacgtacatgcatgttgcccaactaccgtgcatctactacgggtcctctctctagaagcttcttctactaatatattcagcagcattttgcacgacaaaaaagactgcgaaagcacattaattagagagatgcatgcatatggaacaccactgtatctcttttggagatgtttctgtttttactatattccacgagcaacgcacgtctttattattaataaatggtagtgtggccacattatcttctgacgtatattcattcattcgtgtcgactcaagcaagatctggatctgacaaaagacgaagatccagatttggaaaatatagttttttaatcccgattttcaagtaataataaaaataataaaatggcaagtatggccttgtttagttcacccgaaaaccaattttctttttcaaaattctccgtcacatcgaatctttacggcacatacataaagcataaagctttaaatatagataaaaataaaaactaattacacagttacctgtaaattatgagatgcatcttttaagcctagttacttcataattgaataatgtttgttaaataaaaacaaaagtgttacaatgtcaaaatccaaatttttttttatctaaacggggccacctttaatgttcgtacattcatcccatggcgaatgtcaatgcagctacttccaatcaagcattatcaaactttaatgttcgctatagtacattgtacattacatgtagagtaccaatgagattgaaactagacgtaatcatggactttgcttacaacactctcgcttagggtgtgtttcccatgcagttcagatcggattctcttagggcggaacaccaaaaacggttccaaatcgataaatagcagaacatttcagaggagacatgtttcatgcttttgtaccgaggcagagaaacagtgagagacgtgtttcgtgggggctctgattattctctttcatctcatgtttatttttccaattaattattttcaactgggtcaacttaaaatgagttgtatttaagttattctttttatcccaaaaaaaaacaaacttcagaatcttttaaagcatacttttatttatatgattttttataaaaaaatatttttttcgaatcagatctagccaaacaattttctaaagtgattcaatttcttctcagagaatagtagtagaagaaacaggaaaaagaaatccaaggccaggcatgctgcactcggccgctgacaggtgggtccgacgagggagggggtttggtgtgttgcgcggggtaggtggcgagagtcggagcagacgaaattcggtagtcggatcgcatcggagtgaagaaggcatcggcgaatttgtggctggcggaggtggactcgattgcgttcctgctcctgccgccgcggttttaaaagggaaaatccccccctccgtctcctccacctcgcgcaaccaactaaccaaccacctcgctcgattcgccatcgacctcgatccagcccagccagccgccgccgccgcagcagcagcagcagccatgtccaaggtcttcaccctcgaggacgtcgccaagcacaacaccaaggaggattgctggctcatcatcggcggcaaggtataatacatctccttctccccttccccccttccccttctctctacggtgggtggatggatggtcgatgtctcctgttctcttcctcgcccagccagccatggcttaatcttggttggttggttgatcggatctccccagttccgatccaaagattagatttttgcgtctcctgttcatccgactggcggcctgcgggctctgctcaatttttccggtgctaggcaggcttgttttgtgcaagatggattcttgatttgtgtatgctggcgacgaccccgcagatccggcggagcccatcgcgattggttggtctggtgcttgtttcccgcgtagactctcgcgctagcgctagtctctgctctcggggcggccgattcagagtcagacagctcccccagttgtgtcagctgatgaatcgcgctgctctgtctctgtgggtgtttacagttcagttcctgagcacccataaaccgaaccgaatcgaatctgcgtgtttgcttcgtatctgcaagcagacccccacgtttagttggtatacttggcaattgcctgcgcctttgtacttgtgatgtcatcttctatgagtatcctcatgtctcgttgtgacgtggaaattcctttgtgaaaagtgccttagtgcggtcagcagtgtataactaatcgttttacgtcacggcatcactgggagggagtctgtctgggacatttaaagcttgtttctttgcgatagatatatcaccatgccctgtgtcgctccatcttgcttgctagaggccattgaaacatcagtaacagctccttgatacaaaatgcatattaccagatgttttgcctgcgcccctgacaattcagtagccagtaatgttatcgacatcaaattaaatgtccacgattctgcttagtgggtttgtagacttgcagtaggattaatttcgaaagacattatctttcctcttgaatgtattaactatatcagtatatcttgtgtcgcttcatcttgttcgctagaggcaattgaaacatcagtagcaattccttgatagaaatgtgtattaaacctttaaacctttccagatgttttgccccaaaacaattcagtagctgataatgttatcaacttcggattgtccattagtgagttcgtagacttgtagtacgttactttctaaagtcattctctttgctctagatatattctgccctcttccagaagctcgttctaaattgtgaattttgttcatcaagtgccacaactgtgtactgctagggaaagcaagctccttacacatcatcttgaattttatcttcgctttgatataagcatgtaaatcgatggagtagaattttaatccatgcggtagaattttcttaaagactgataaagtccaagtttagtacctgtgtttctgaccaatcatatataacatatagatggttcctattgccttttttccaaattgatagttttcttatcttcagataagacatgctacttaacctttatgaaacttgttatgtctgcttagccttccttggaaacctgaggtttttcatttgcataacattatttcacaatgaatgttgattatctcttatcacttatttttatggtcctgccccttttgctgatgggcattgcaccacctatgtcattaatgtttgtagaatctgatttaatccttttctctgaaagaacctcaccagctctgtgttttgctgtggaataggtatatgatgtgacgaagtttttggaagaccacccagggggtgatgatgttctgttgtcttcaactggtatgccttcttgtctttacataccagtagtaccactaaccagtgcctgaccaaggttgtgaaagatatgcggtaacatacaatccatttgaacctgatacaggtaaggatgcaactgatgatttcgaggatgtcgggcacagcaacactgcccgtgcaatgatggatgagtacttggtcggtgaaattgacgcatcgacgatcccttctaggacaaagtatgttccccccaagcaaccgcactacaaccaggacaagacccccgagtttgttatcaagatcctccagtttttggttcccctggcaatcctgggcctggctgttgccgttaggatgtacaccaagtcggagtctgcttagctttgttgcccttgcccccctcgggattgtaagagtcgaacttgtcgaataagctagcaagagttttgtgaggttttattacatgtgtaacttatcatgaaattcatcgaatgttctgagctgttgtgggttctgtggtccttatatgcccattttgtgcgttagtgtgatcgggatgcatcgtacttaactagatttattatttgtcatctcagttgagcaggtaactctgattgtttgaaactagcagctagctgctgttctctcttacttttgttgaagttggctgctgtcagttacaaaccaaaattgtactttgtacagtcagttttgattgtctgagtttatttatcttgtctgatgacaaaaatatgacggtgtcaaggtcgtcttggatctggttaacggacaagggcggcaccgcatccggtttctgcggcactggatcacagatctggttgctgttgcgggcgttgaagagcggcagtggcgagcacggaggggaacctttcaagtacaagtacaattgtagtatctaaagttaagcacaactcaggccttgtttagtttatgaggtgtacttggtactttcgtttgtatttaataattattgactaattatgctaaaaaattttatctcataaattacagaagttaattactgatgttagttcgcatggcatttttagacttaactcaggctgtgatatggtgactagatgcagatgccacgttga

SEQ ID NO: 4900 - DNA, 2722 bp, Sorghum bicolor
atgccatgggaaaatgacaaaacaaaatcatatatctctgaaattttctgagagaatgggcaaataaaatacaacatgagaaagacaagaagaaaatagcccaaggaccaagcaaatccaattttcttctgatttgggccgctgtcccaattttgaccctaaagcactcaccgagatcaaaaaacattttgaggagtacacatacaccaactggtggctagatgtactaaaaaatatcccagaaacacagcgaaaaatggaagcaagaaggggaacaaatagaaaaaaactcataaaacgcttagaaaaccagacgtcctcagggtccaatataggacgtcggtatgagatttccgcccaacaaaattcaacgtgggaaggaataccggaccctccgatatcgacgcacaacccaacaaaaaatttctcaacaaacccaaattctaactaaatagtctaaggaaaatcccaaattttgcatacgggttcccttaggtatctcgaaactttccattgaagatcatgacccgtagaccccataatcaaataggacctaaaaaccaacctttaaaagagggttttctcaaacttcctctcaagggtggattttcatgcatgtgatgaatctgtccaattaacttggcccatatgttcatctagggtccttgtacgttccaagcccacaaaccatctccaagaccgcaaaagcacaaaatccacgggaaccagagaagaaaaaaccaaatccaaacacaagttagaactcagatttttgaagatcaaccaactctggttcttacaaaggaccatagaaaactttagcagacagggtatcaatctcctgaatgtggatctcaacagacttagggaaaactggactgaaaactttcacatatcgattcctcgaatagtactataggagtctgtacagaacattccccctataatattacaagctcccatagcaatgacgtattttggttcaggcatttgctcatacaatctcactaaagaaggagcccttttcattgttaccattcaggatagatggatatcagaaaatatccatccctgttttcatcctgagttgaagggtgggacaaaacgatgtgtgtgcatatccaagctagatggataagcacatacaacacatttgtgttgatatgtttgtagtattgtatcactctgtgtatatgtgtgaggtattgaaggcagtgaaattccagcaggttccttctcagaggatgagagagaggttggtatatatcattttttttgaggaaactgaaggggccaaggcccctgcagaaagctttattaagaaaaaaccaaaacaaaagggtacaacaattacagcagggttacaacagagcagagttcaagaaacaaagaaagacacaaagaaaattacagagactaagaaatctataacagttgttgcatccatgaatcaaaagaggtttgaagggttggtttaactctcagagccaccaacgagagttctttctgaaggatggttcttctgccctttcgctcacgtgggaataaagctataactaactaatgacaaatggtgacatggaaaccttgtggcaaccagatgacaataggatccttatcaagatctgctaactggcaaacaaagctagctattatcagggctgactggtcctttttgtacacccttatcttcatatggcatttggtatatatgaaaggccaaagtagaaagttaacgaaaaccttgttgatatgatcatttctgtctcctctggccggttggatgggtctattaatatacactactactacactagtctcacacacacatagccattttctttgacaagaagtaagtacaccttggtgagctcaagtagtttgtatacattcctaatcaattatgatgtttacttctcttgctaaactgatccccctccttatatatgtccatacatttgtgtatgtagattgactaaaaatataatccattgtcgaagatgagttccattgtcatgggtgctaccggtgacaagaacaagacatcatggcccgaggtggtgggcatgtccatcaatgaggcgacagatattattcttaaagacatgctcaatgcccacattgaaattttgcctattggctcaattgtgacccaggactttcgccttgatcgtgtccgcatctttgtcgatattgttgctgaaactccgatagttggttgatacagtgcacatgccttctctagatatgatttaccaaataaacaaagcctaagtttatgtatcttggttaataaatcttacctttcttggttgttctcgattagtttagcttattagctacatcatcatcaaaaggatgaccaatgaattccatatatgtatggctatcttgaaatataatcctgatggaatatatagtaaataaacaatgatatatgcaatcatctctatgtcaaaatagcccaaaaaagatgcctacagaagagacgacactaggacaaaacatgtcgctgatgtcaaattagagatgtgggtaaaccgaaagctgctcatgttgatcagagagagacatgtcatctatccacgtccctgatgagagagtggctcccatcacagaaacgtttcaacaagaggcatctctgatgtgatccccatcacagatgtgtgatccaggacgagaaactcattagagtcatgactgtcgatacccatctctgatg

SEQ ID NO: 4901 - DNA, 3565 bp, Sorghum bicolor
ggccagtgacgctgcatgcactgtacagcctgagtgcgggagtgctgtgcttgctgctgctcgacctagggcttgtttagttccgaaaattttttggaaatagacactgtagcactttcgtttgtatttgacaaatattgtccaatcatagattaactagacttaaaagatttgtctcgtcaatttcgaccaaactgtacaattagtttttattttcgtctatatttaatactctatgcatacgtctaaagatttgatgtgacggggaatgtgaaaaattttgcaacattttttggaaagtaaacgaggccctaaccaagtgttgcttggtcagtcaactaataacctgcaatctagtgaagtcgactcctgctggccaccaggtcaacaaaagctgcaccgatctttgctaatttcagtcattttaactggtctaaggcctagcttgtttagttcaaaaaaatttacaaaatttttcagatttctcgtcgtatcgaatctttagacacatacatagaacgaaaataaaaactaattatacagttcacttttaatttgtgagatgaatcttttgagcctagttagtccataattaaataatatttatcaaatacaaacgaaaatactatattgttcattttgcaaaaaaattttgaaactaaacaaggtatatgccatgcatgctacatatatgttaattaattacataaagatctacagctagcattacaactattcaacatggtgtgatatatactactccatccgtcccaaaatagatattattctcgttttccgagaagtcaaacacttttaagttggatcaaatatatcattagatagatcgttaaatatatttttctaataaaacttatttagagatataaatgttgtatgtattttctacaaacttagtgttaaagttgagaaaaattaacctagacgtatcccataatgacatctattttaggatggagggagtatactcaaaggttttttacatgtttgcactgttgtcgcccgtgcattttaccacagctagaacgtacgacgactagtaatacctgccatgtgttcatcagtagaaagatcaaaatattacacgttaagcttgcttgtggattgggtttgtctcgtttttttcggaggaaagcagaacaggtcatcatcctagaatccattcatctcgaacgatcgtaacatgcactgaattacatgcatcgatgatcgatgagcatgacttgctctcccttggagctagtcttggttagcaaaatttgcatgctgcgtgcatgtccatctacccaagcaagctggtgcaggcagggcatctctgatccattcatctcgatgatcgatgcataaagaataaaatgatcagcagaggcagaccagacctagctcctgtctcggagttggagctggtcttgggccttgtttagacgcaaaaagtttttgaagtttaacactgtagtattttgtttgtattttgtccaactatatactaactaggctcaaaaaatttatcttgcgaattataggtaaactgtatagttagttattttttatctaatattaatatttcatacataagtccaaagattcgatgtgatacaaaatcttataaactttttgaattttaggtgcatctaaaggagcctctggttgagaaatgagaagagtccaaagacaaattctgcgtcatgcatgttcatcagtccaagcaagctgcagggcatgcagccatgcaggcgactcgtcttcctgttctagaaactggaattgctagctagctatggacatactctagttgacattatcttcacaagttgccctcgatctgcgccatgtgctgtggagcacgtctcactggaacactgggcccatccatatgcatcccatggccatgcccattctcgtctcgccacagccatacattcagtcaactatggccggcgctgtggctgcgtatatctcgatctcgccgccaatcgctagtcctcgccatgcataacttatcaacgccaccaccatcccccatatatgtgcatgcaaccaaacaaaccaatcgacagccctgagcaggaggaagacgacgacgagtcgacgacgacatccgccccacaacccacaaaaaccagcatggctccatcgtcgacagtgctgctcgccgccgcggtcgtagcgttaacgttggcaccgcggccgagcttggccgtggacccggtgagcacgtactgcgccaagaacttcaccggcgggcagacgcaggcgagcatcagttcggtgctcgccacgctagtcccgcgcgcctcgacggcctactacgcgacggcgatggccggcaccggcggctccaccatctggggcctggcgcagtgccgcggcgacatctcgtcgtccgactgcgcgcgctgcctcgccgcggcggcgcggcaggtggcgtcgtcgtgccggggccaggcggacgcgcgggtctggtacgactactgcttcctccgctacgacgacgccgacttcgtcggcctgccggacaccgggcacacgctcatcctcatcaacaccatgaacgccaccggcgacctggccgcgttcgaccgcgccgagcggagcctcatggcgcgcgtcgcggagacggccggtgaccccgccagcgccgggctcgccaggaagacggcgaagtttgggtcggaggggactaccatctacgggctcgggtggtgcaccagggacatcgccgccgcggattgtgggctctgcgtggcgcaggcggtggcggagctccctaactactgcagattccggaggggatgccgcgtgctctacagcagctgcatggcgcgctacgagacctaccccttcttcttccccgtcaccggcgacgacgacgacgtcgcggctgcctcctcccacgccggcgagtacgagactgtcatcttgaaccacaaatagtagtttctcgttcaagtgtacgcttatcaatcgtgcgctagctatatatatcacttgtactgaataattttactgaatgatattttgatgacggaaattgttgcagaaattgaattaatcaaaatgcaagaattttccagtgccgcacgatcgaagtgtatctttctatcgtgtgcaaagtggtggcacgcaaaatggctagagatggaaatagttatttgctgtgctagtcaaactcaaaccttttacaacatggtgcttccgccgtcatccaaccacatcaatcggtcgctatacaaagtggacgcggcactagtaaaaaaaacctctacgctggtggtggagcaaaacggtttcaattaaacaacgtttgtagaaagaaattggtttgctcgactcaaaaaccgtttatgaaaatcaattttcactgacggcatgtaggaatggtgcatttccacaggtggtttcttaagaaacccgctagtgaaaattaattttcacagacagagaaataatgtatttctacatgcggttttctcactaaaaatcatatttttataggcggtttattaagaaaatcgcatgtagaaatagtttgaaattgaagtttttg

SEQ ID NO: 4902 - DNA, 6354 bp, Sorghum bicolor
acaaaaacaaaaaaataaatattagtagcacaattggtcgtgtgtgcggaaggtaaaatctacgagcactgaaggaagcatctgctcggccttgtttagttcccaaaaacttttgcaaaatttttcagatttctcgtcacatcgaatctttagacgcatgcatgaagtattaaatatagatgaaaataaaaactaattacacagtttgatcgaaattgacgagacgaatcttttgagtctaattaattcataattggacaatatttataaaatacaaacgaaagtgctacagtgttgattttgcaaaaatttttggaactaaacaagaccatgtagtatatgcctctctaatttacacaagtacagagagcctctctaatccgttgatcctaccaatctgtgatctcgtgcatggccgtggtcgcagtcgcacctgcgtttgtccacggatccttcatcctagctattccttgtgcgtgcgtttacactttgcacacacggtgactcgctcattatagaagcaatatgccttgtttacttccacctaaaatttaaaaagtttttaaaatttctcgtcacattgatcttgcgacacatacatgaaacactaaatataaatactgtaaataacaagatagatctgcttttaaatctagttagaccataatttaaatactaattactaaataaaaaagaaaacactacagtagtcaaaataaaaaaaatcggaactaaacaaatgcaggaattggaggcggtcgtggttggcgctggccctgtcatgaccacggtgaaaggtgaggcacaccacgcagctcctggtcgcgcctccaccggctacgaccgcgcgcgcctcctgttgccgttgccgttgcattgccctgcaccaccaccgtccaccgacgtgcggggatgcgaccgacaccaccagtcctccaccaccaccccttgcccttgggttgcttgcaattaaactgctgctattggtcgcccgtcgccgccgcccgccgctgcagctgcgccgttcctcttgttttgttgacgcgccaacgccacatccccgctccgccttccggatgctttttttttttattgtggctatcataatataataataataatccacgggaataacaaataattgaaaaaaaggaggaacaaatatttggtgcacagaaaactcatcactgttcggttgcgccgcagctagctgcagctgctggtggtggtggtggtggtgcagtgccgccgccgacggatggggcaggggcaggcgtcgcgtcgcttgtacgccagccaagcatgaatgaattgaagcatccaatccacaccgaggcaccaaggcaccttcgaatccgattccgattccacccggcctccttgcatattcctcctgcgcggaggcagcaatttttaataagttgttatttaattcattttattagaaaaaatgaagaggaaaaaaaacacacacagacacaagcaccgacaccggcccaccacccccgtgtcgtgtgatgggctgatgatgcctgatggcatccaacaacgcaccacgcccccaggatctgaagagcggacccctctccaccagccgctcggtagcgtgcgccacgtggagggggaagcgagtcggagaagtggagaacgaacgcgcgcgcgcgcgtctcccttccgccggccgccaccggagtccgggtccgggtcgctgaaaaatcgcagaaacaacctcggcttccgaccagcttcaaaacaaaatgctactgcacttgcacattcgagggccaggggcacgcatgtaattaaggggaaacaccgaggggtgttgggggggggggcgtgttccacctcccccacccacttgactgcctgaacagagacagctgcttctgctactagtacgtagttttttaaaaaaaaaaattgaaattaattgcaagcaagcgtggctgcctttaaacgcggaaaagcgaggggagggagggtcccaccgaacccacccaggaagcgggaagtacttctgcttgtgcttccattccaccacatctccctctctctctctgtcggtcctcgtccgccgcgcctccctccgtcctctgctccgccgctttaaaaccacaccgcgcggctccgcccactccatcccatccccgactccgtcgcctgcctcccgtgccttgccttctagggtttcccccgtcgccgcctcctccctctccccagatttggatctaagccgccgccgccgccgacccaggtgcgtacaacgtcttcctccctcctccttcagttcagttcagttcagttcagttccgccccgtcccgccaccgagcagcttgctgctgctgtgctgcgtcgtaggtcgatcccccgtgccgttccgcttcgcctctccgattaggctctcgcctcccgcttccgcttccctgggaactggaactcgggatgggatgctctgtctccgcacgcccgttgcttccgcctcacaacagcggggtggctgttcttcattttagttccttcattcatccatccatccatccgccagcagccgcgagggtttcacttcctacgttgtcagccaatttgatgctcagaaactcaaaccaccttcttgttcttgcatctctcaccttcaaaaaaaaagaagaagaagaataaaaacatgacagagcaaaagtcattcagatcgcgtgcctgtgcatcaaccacgctttactgctctgattacttgccgtgtcctgacgcccaacgccatgtcaacaatacgcgtgcgagcgcgattcaaacctgttaacggctgccagcctgccctgccaccaattttcctctctgcattcataccataccataccataccataataagcgtactaatccctccctcccttgatttgatttttacttttagttgccgcaatttttccgcgccatatacggatctcaacttgaccatctccaaacacgcgactactagtcctctctgcaatagacaccattagtcctcctctggaactgcaatagtcacaattagtcctctgcaatacggaagttgccaacgcttggcatctctctgctcctgcgtattaatagactgtgagtacacgccaggcaatttaccatggccgcgggcgctacttcacagctcattcgttggttctgtcgctagtagtctagtactgttatcgcatcatgtatattggctctgtttctatgtgctgccgagccatacatcacgttcatggtgctgcatgcattgcagactcccttgttagctcccatcatgcttttcagtttgctatcagttggttggtgaatgatcaatgttttttttttggatcatacgtcccgcgtgctcatgcgataattaatatgcaaatgaaagaaaaaactagggttatatattgcataatatctaagccgttacaagactggtgggcatgatgacttgtctgcttatgcactttattgtatttatttattaattgaatcagacaaggtagatattggcatccatgttgacaaaagtaacctggaaatccagtaatcttattttgttctgccttctttctcaaaaacattgccttcatccattggttgcatggtcgctcctgattcgtgaaggctgtgaccccccctcctattaggtagcctaacaatgttgttttcgtttgggatatttataacaaaggaacacagatcaaagcttctgagtgtagtcagtgttggaccatgtcttcagcatggaccctgttaccacactcggtcaatttggactctgtcatgagtgtacaatgttttactcttccttctcctggaagaccaaatcaaatcaacttaaccggagatcttgtattgtaatccttggcaggttgtcttgatggcgcccgctgtggaagccgtgaaggagactggctcgttccaaaaggttcctgccttgaacgaaaggatactgtcaaccatgtccaggagatctgttgctgcccacccttggcatgatctggagataggtattgtactcactcgtcttgacatttggccagctattgatttctgctatttgcattgagaacttatgttcttcatcttcaattcatgcaggtcctggcgctccaaccatattcaactgtgtaaggccaccctatcatgcttcaactgattgacctgtcttcttgttacttgagatcattgtataattcttgcgatatgtttatgttaatagcatagtgcattttcttttcttgtagaaaaaaaattctaatcaatgcctagaaacctatgaactgtcatgcatgttcctgtgccacttggcactttctgatgcatgatcagatgtttaagaaagtagaagtgactcctactcctatgccaggtcattgagattcccaggggcagcaaggttaagtatgaacttgacaagaaaactggattgatcaaggtaaagcaatgctgtttacccccagtcttgttgcgaagctatatttcttgttagttctaatatttcctattttccatttcaatgtgtgcgcacgtgcaggtggaccgtgtgctgtattcatcagttgtttaccctcacaactatggattcattccacgcacactttgtgaagacagtgatcctttggatgtactggttataatgcaggtatgcttcttttttccattttcttgttttttcatatcattatatgaatcacaaaatggtatatcagtaatggtctgagcagtcttaggtataagttgagctaattttcatatcttatcatttttccttttctgggtatggttgagaacatgtctataaataaactgttacttccatgcatgcaggagacagtcattttccatttctgctatagttgagagtatgtatgtaaaccgttacttccatacttgcaggagccagttatcccaggctgtttcctacgtgcaaaggccatcggcgttatgcccatgattgatcaaggagaggcagacgacaagatcattgcagtgtgtgctgatgatcctgagtacaagcactacaatgatatcaaggacctcccacctcaccgcttggctgaaatcaggcgcttctttgaagactgtatccttttatgattcattagtacttcctctaacttgtctacaagaaactactttgcaaaattccccaaacttgacctgaacatcacagcctctgccaatttttgaagggaaaaaaaaatacttgtcatgttttaactatctttagacgatgcaaaatgttacaatgtctgcctcttgttagattgaattttttctttaacccggacattcatcagacaagaagaatgagaacaaggaggttgctgtgaacgactttctgcctgcaactgaagcttatgaagtcatacagcactctatgtaagttgactgattgcaactcttcagttctgatcatcaacgtagcagtgattgttttaagacatgtactcgtttcaactttgaaactaaccacccagcaatgtgatgttcttacacagggatctgtatgctacctacattgttgagggcctgaggagataggctgctggtggccgggaaggtgaaggatgttgacgaaaaattgggagaccgtttaccacatggaacgagtattgttattttgtatgtgtcgtgtatactactagtagtgaaccctaaatcaaaaaaccgaaatcccctggggagtcggtagtagctgaagctagtaacacaaggttggctaaatattcttttctggcctcagtgccaatatatgtttgacatgttgtacgtacttcattgtcatggtaatattcattcgctttttatgatatagtgattgaatgtgttctcttgtatctatcatttgaaatacggtggcaatgtacctctgtacagacctgcaaaggcgtgaaagtttttgtttgtgatgagggcttgaacactttgtgatgaaatcatgagcaggttattgccacagaattagtcttgttcattctacagtctgttggaacaattggttgaaatctgttcacaattgcaccaccagcgaatcggttgcatatttgaaccctcaacttaaatcaactggacacaagcacaccaatctgaatttactacaaatccacttgttgaactacaaaaattgtcaggaaatggacatccacttcaaactcggattcaatgttcgactcccatttcagccacgcaaatacggcagacatcaaattttaaaataaaacagcatgaatttcatatctaaatgtacttgccaacctaccaattccgtctgaaatgtactcaaccactgttttgaaacccattcacttatccatcaccatttcgtttggtcatgctgcaaatcacaga

SEQ ID NO: 4903 - DNA, 4533 bp, Sorghum bicolor
atgaaagttcagtctatacaagtaagtaattgctggtgctctctgatcgagataaaagaaaaaaaaaagtacatagcatgaccaatgcagctgataaaataaattacgtacttcattgtcattgttgaggggaaaatctgatctgagcaaaagatatatgactctttccacatatatatgacggtatataaaagaattgagttatcccaagaagatgaaaatagacgaggatcatcaggggcaataaactttactacagtttttctatgtcggcatccacatgcattagctcgccaagaatttaaaagttcaatctagtacaagtaaataactgggtgctctgatcaagatgaaataaattaaagtacacaggatgaacaatgcaactgatatagtactataataagaaaccacttcattgtcgtccaggggaaatatgatctccggacaaaaaaatattgacttatttccccaaatttaattttataaaaaaaaagagttatcctcagatggacgggatgaaaagagaggagggtcaccaggacattttaggtatgaaagtgttgaaaagtagacaatgagtgaaatacactatataggtccctaaaattatttgtaggtgtcatatagatccccaaaatcccaaaatgcatttttagatccataaagttaattagtttgagtctcatcctccaggatcaaacaggtatttacccaacccgatagctgacatggcatgctgactcagcgcctacataaatatgagagatgacctacgtgttagcggcaaggctcaatcttagaaaaatcatatctttttcatatggccttggatgaagatgatttttatataaaattgtagcccttgatgaaatctataactttctggttttgaatattttcatttaggattgttaaaatgctctgaaaaaaatataaagtttgaggaccaacatgtccagatcgagttttattatttggacatatgctgatggtacaaaaatgaggtatatctcgagatggatgcatggaatgagatgaggatcaccagggcaatatatatatattgcatatatagtcacgaaagcgcatgggaggaagcatcatatatcatgcatcgttctaaggtgctcgtacatgatgcttaggacattttcctttgtccgtatacacgtgcattggctaccgtcttttgtgtcctactgtaaaaatgaatgtggcatgtatctgtgctttgaacctggaacttccaaagtggaaaatgctaagtttgattaatgattatatatagtatatatagttcacttgaatttacttatttctgcacccttgacagtgaacagctgctggctacttgaatctcaaagtgttagaagctttttgcttgggaatgctggaattcattggatcttggttggaggatggagattgaagttactgctctgtaaacttactgaatttgcctctgagaaagagaagatatacatgcatgcacacaccatctcgatcgtagctagcaacaaagtgagcatagatccatggtccagggttttattatttcgacatattcttatggtataaaaatgagttatatatctcgagatcgatggaatggaatgaggcgaggatcaccagggcaatatatagcgcatgggaaacaccaagcatcattctaaggcattcagtgctggtacgcgcttaggacacttttgctatgtccgtatacacgtgcattagctcgcaaaaaggatctcacagatcagtctagctagtacaagtatataagtaattagtgctctgatcgatgaagataaaagaataaaagcacctaagcgtgaaccatgcaactgataaaataaactactacgagtacttcataaattgtcggcggtgtggccctttcattgcggcgttgaataggagtagcaagctagctagctaggtcacgttggtcatctataaatacgtagtccttgttacaaatcaagcaaggcacacaaagcaagctaattaagccacgtacactgcacacaagagagcgcttagccagcaaaaattagagtagcttaattactagcaatggagaaccctccgagtttcgtagtgactcccatcgctgcacctgtatcagcggagttcaccaaactcaccttccgtagcttgtatattcgtcgaagtggtccaagcagcagggagatatctatggatggaaaatctgatctcggcaagagatatttcagtgacttccccgtatacgatggtcctggctccgaggccaaactcgtggctcgtgtgcagggactctcagtccaagttggtaacacataccaaatattcaccatcgtctttgagaccgagaggtatatgtatatatgtgcttgcgatttcaatacattcatacatatatatgtcgttgttaaacttttcaactaataacactactagtgtgtcactttcatattttccttaaactcatgtgcaatttatcattagagactgaaattataagggtgagtctcgttacacagtagctaataagtataaacctgcttctcgatctatcagctccatgtttggtatgcataaaacgagatataatcttcatgcatgcatgtcttcgtcacgattgactaataatgtgacatttccagagttattaaacaactgtcatggtaataaaccacatttacaaattaaactgtcgttctagtatatgcggagtacttacttgtactacttcacacagaaaatatgattaacttaccctaaattaaatatacaggctcaagggctcaacgctccttaccaatggagtgataactggtgggtctgatgaatgggcaattttcggcggaaccggagcgtttgctatggcgactggtgtcataaaaagaaaatatcttgctgatagggatggggggaaaaatactgaagaacttatgatagatgttttctgcccactgtttgttgcttcacagccgaaggtgagggaaatctttcatagagtagaaagatctatatgttcttaattatctgcatgcaggacaggcttgcaaaggtagtatactcacaggtcacagctagctagcgttcttggatgaaactctttggtactggatgcagggccctaccacgaaggctggattatggggtggacagggagggtcgaaccaggacataacggtgccaccaaagcgtctgcagagcctcaccattcgcagtggcagcgctattgatgctattgagttcacttatattgacaatgctggtcagaagcacactgctggcgcatggggtggacctggtggcactgctcacagggtgagtgagttttttacatacccctatctttcagcaaataattaattaatggtgtaaatatgacacataatatataactaagatgattgattgcccaactttatctgggttatttctctgctgcacagaatgacagaagcagctacattgacatctccatggaaatttctaaacaatctgcctgatttatgtcttcctcatgcctgcagatcgatcttgacgatgccgagtatgtcaaggaagtttcaggaacctacggcacatttgaaggcattaccgtcttgacctcattcaaacttgtcaccaatgtcagaacctggggcccatgggccatcgagaatgggacacctttctccatcaccgcgccaaccaacagcagcattgtgggattctatggacgtgcaggaaggctcatcgatgccattggtgtttactttgcgtgaattttgaagagctggcctagatacactgccttcccaaaaatcccttaaggcccgtttgtttctgaactggaatggtctggaattgtttcaggcctaaaatcattcaatatttatactaggctgaaaatattcggggctattctaggccagaaatgtctaaccgaacgggcacaataaatacaattagctaggcagggacaatgcaatgcactggacatatgttagtgtctatggccatcatcatcctttgtcaaataaaggtcttgatcaaagactgcctccatgttatcgaatcatttccttttattatagtttggggctttcagcattaaacaattatgtattaatatttatttacttacaccaatttctgatcgagcacaaaatgtccaaataattcaaagatcatattattcttagagaatttttacaatggttggaaaggcgatgtgaagcgattaatgtgtctatggttggtgggcctacaacatgagaagcgatgagaggcgatgaaagcaatacgataggaagcgattggtgtgtctatgattggtgggccatatatgtcatgtcgcgcctcccatcgcctctaaaattgagaggattaggatccccaaatagaggagcggtaatttcttttttcgtagttcttttttaataaagggtaaaagggtaaatgtataattaaaaatgtttttgagtagtatatggtgtataattcaagtattatagttagatgtatattttcttgttagggttcattgaactt

SEQ ID NO: 4904 - DNA, 4911 bp, Sorghum bicolor
caagcattattgtttatgcaccccaattcgaaggattttttttcttggttcatcgacttgcaacggattcaagttaccaaactctcaaaataatgcgatttttcagatttttcaatcttgccctaccttatccttgatgatgtcctaagctctcaaaatgccaaccttgcgcggcaggtcaccgggacaagtatccttgtcgagtaaccgggagaggtcactgggattgagcgcgcacggtggcatgccgactaagacctctcttacagtaacaaaagagagatgctatagcaaaacgagtgttttttagcaatcaaaccctcgaatttctcttcttcatctctagcctctccatcttttcttttacaaatgtggcagcagactaagcgtcagggactgcataaggacagcgttagggttccggcggtggtgaaggtggctaggtcaaggtgggggctcccgtgaccatagtggcagagaggggaggagaaggagaaggccacgacagacacggtagggtctcacagaaactccacggccacagccactacgtcgagaccctactatgccacgacaaggcactgggcaacgacaatgcattggaggaggaagacacttgaagaaaagaatcgagtgttttgggctccaaaagcgcttgggggtgggacgtaggcccaaactccgtccccttccacctagagatcaccggtttcagccttgtcgagaccgccttgttcgtttggctaataaatcacggaagaaagtactgttggctgatttattgtcagagaaaaaaaccacgaggacccacgaggcctttaatatcaaagcatggagtaggtctgaagataacttcaggtcaagacaacatacatgacaaattcgaggacctgaaaatactacatatcaggagcctggtcgatacctcaggaccagatgacacctctcaacagactaattaaggaacgtccgtgcattataacctttttccagatctatatcaattatcaagtaacagatctcacgcttgtgcatgtggattgtacgcatggccaatggccagccagtattcttgctgcatcacagcctgaaaagggcagcagtgcccactactgtacagcctctcacgtgtcctgcaggcccggatcagagattcagaagggactatcaggccgtgcaaccataataatgtactcctaccagacaatagacaacccatgtcccttgagcctatcgaaaacagttaaattttcttttccttttaccatgattcaaatgcgaatctagaaagacccagttgttttgccaccacacaacgacacaaccacagcagcagtgggtgcctgcaactgcaagtagacgataacctacgtgcagtggctggctactgtctctgtctgtaaaaccaggtaggtatccacataaaaccgacaccgaccaaaatcaggctttgagcttatcaagctcaactcaactggtggccagtttatcaccgagtaaaaacccaacgtgttccaatgtaattgacattgacatttctatcaaaaagaaacaatccagcggtgttttcttcctagatggagttgggactctccaagggaagacattacatccagcgcgttagctgggacacagatcctggaagacgcgaagcacttctaagtttaggacccccaggagcctattcttggctcagcaaatcctcctccgcgcaaaggcatgaagcaaatgctcatcccatctgaccacatttccccacagagatcacatttaccgcgcacaaagcaccaacacccgatcgattgcctgtatgcgagatcttcagcacaaggagggaggaggatgatgatgatgcggcatatagacacccacccatgctcccattgtccacacaacgaggtctgcagatttgtctgtgcgttctagaaagagggaagaggtttaccaactgcaagagcggagaggaatagggatccaggattgatacatacagttgggagatgatgagctgctttgggtgtttcaagcctgagaagaagatgcctccccggaggctggaggccagggaggtcacggttgtgaagaaggccccaagccagaatgaagcgcctcccagggaatctggtaagaatcacaagatgctcctgccactgattgcaaagagaaataaggaattagcatgttttgtactgttcaatctgatagcatagaaaaggattattaggagccatgtcggcaaacagatcaaacaattaagaaacaaattaaatacaatgcaggagtatacagatccaaaatctgcaatcccccaatacgtcctgttcttctgcacatcaattttatagctggatacctgtagttaaagaatgtataccgtaccaggctcagtggtttcctgcagatgtgattagacctccaaataccgaccattcagtgtatctttgttttaaggacgaatgacacccctgtgccactgtcttccctctgggttatgtatatatattcctctctgaaccgaatccgtgtagcaattatattatgcactatctgtttccctgtcagcgtcacatgtattttggtgttatacatactactgcaattcatgtctagttcttaactgttatggatgaaattggctttcattcagtgatataacatattcatatacatgctcttcaaatttgttcagcaaatgacaagaagaatctgaacaactaaatgagcagacaatagaaatttatgtctaatgcagtttaccactcacctttgcagggtccgtcaggccatcaccagtcacttcaaagcacaagccatcatctgaaacaccaacaagcactgaacctcctaaaggaagttgttctgtttccaaaaccgcaaaagcattcacattccgtgagctagccacggctacaaagaatttccgttccgactgcctccttggagaagggggctttggcagggtatacaagggcaagcttgaaaatggacaggtacagaccacatagaaaaacattcaaacatcctaagtacacacacttgctaattcatctgcagtaaccagtggctgacttgttttcgatttgcatgaacagcttgttgctgtcaagcaactagacctgaatgggtatcaaggcaacagagagttcctagttgaggtcctgatgctcagtctattgcaccatccaaacctagtcaatttggttggctattgcgcagatggagatcaaaggcttctggtgtacgagtacatggcacttggttcacttgcagatcacctgcttggtaagtggtagtcatttgtcttcactaacacattcagatatcactatatcagtgctacataattttataatatggtgaacaagatacttaaatgttcaaatttgaattgccatcgcagatagcactcctgatcaagtgccactgagttggtatctcaggatgaagatagctcatggaactgctaaagggcttgaatacctccatgagaaggcaaacccacctgtcatttaccgggatctcaagtcccccaacatccttcttgatgagaagtacaaccctaagctctcagattttgggcttgcaaagcttggtccagtcggggcaaagacacacatctccactcgggtgatgggaacatatgggtactgtgctcccgaatacataaaaacaggccagctaactgtcaagactgacgtgtacagttttggagttttcctactggagttgatcacaggaagaagagcggtagatacctccaggccagcaaatgaacaaatcctggttaactgggtacgcacttctattttattactccacatatacactcagaacttgtttgcccattgtgttcattgcagtagtcagttatataatatagctgacaactgcaatggaacacatggaaataaatgctaaagcctcagttaggaattacccaaagaagatttttggcacaaggttttctgacaaattcatctatgatcaacaggtcaagccattgctgagagacaggaagaggtacaatgagctagtagaccctaatcttagaggtgagtacccagaaaaagacttgagccaagctgtgggtgtagcagcaatgtgcctacaagaggaagcctcagtccgaccttacatgagtgatgctgttgtggccctgggattcctcgcagaaatgcctgctggctataaacacaaatctggccctatactcccaatgaaacaagttagagatccatcactaactaatagtggtagcgctaagcaacataacgatgcatacaatcgtcaaaaggctgtagctgaggccattgagtggggctcactgaggcagaaacagaaggctcaaagtccagaaaagaaagctcaaagtcaaggtggaacatcccctccagaagccagcagattgtaaaaacaactctgttgtgcattaggctaccactgacttgtaaccctccaattttgtgcaagctggggccaaattgtcccacatagcttagagtttgtaaatgaagtttttctctcataaagacataagggatctatagtatttgctgttaacatatatgtgttggatcaggaaggaattcttactccatcttgtatacgtttagaccaattttgggtctatgataatactgattacccttgtgcttctatgtaacatctgtagaagagaaggaaagaggagcacaatgaggttatactgttacactaatactatctagctacgatggttcaaagccttagaaaaaattcaagtgcgcaagtgacagtgtctcttcgaatctttttttactaccagctagattttttcaaaagacttagagcctattcgagaagggagcattgatccaggagtttttatcctaaacccctcaatccaagcaggccttgacctgcagcatcaat

SEQ ID NO: 4905 - DNA, 5256 bp, Sorghum bicolor
  misc_feature (1)..(1253): n is a, c, g, or t
nnnnnnnnnnnnnnnnnnnnnnnnnnnnnnnnnnnnnnnnnnnnnnnnnnnnnnnnnnnnnnnnnnnnnnnnnnnnnnnnnnnnnnnnnnnnnnnnnnnnnnnnnnnnnnnnnnnnnnnnnnnnnnnnnnnnnnnnnnnnnnnnnnnnnnnnnnnnnnnnnnnnnnnnnnnnnnnnnnnnnnnnnnnnnnnnnnnnnnnnnnnnnnnnnnnnnnnnnnnnnnnnnnnnnnnnnnnnnnnnnnnnnnnnnnnnnnnnnnnnnnnnnnnnnnnnnnnnnnnnnnnnnnnnnnnnnnnnnnnnnnnnnnnnnnnnnnnnnnnnnnnnnnnnnnnnnnnnnnnnnnnnnnnnnnnnnnnnnnnnnnnnnnnnnnnnnnnnnnnnnnnnnnnnnnnnnnnnnnnnnnnnnnnnnnnnnnnnnnnnnnnnnnnnnnnnnnnnnnnnnnnnnnnnnnnnnnnnnnnnnnnnnnnnnnnnnnnnnnnnnnnnnnnnnnnnnnnnnnnnnnnnnnnnnnnnnnnnnnnnnnnnnnnnnnnnnnnnnnnnnnnnnnnnnnnnnnnnnnnnnnnnnnnnnnnnnnnnnnnnnnnnnnnnnnnnnnnnnnnnnnnnnnnnnnnnnnnnnnnnnnnnnnnnnnnnnnnnnnnnnnnnnnnnnnnnnnnnnnnnnnnnnnnnnnnnnnnnnnnnnnnnnnnnnnnnnnnnnnnnnnnnnnnnnnnnnnnnnnnnnnnnnnnnnnnnnnnnnnnnnnnnnnnnnnnnnnnnnnnnnnnnnnnnnnnnnnnnnnnnnnnnnnnnnnnnnnnnnnnnnnnnnnnnnnnnnnnnnnnnnnnnnnnnnnnnnnnnnnnnnnnnnnnnnnnnnnnnnnnnnnnnnnnnnnnnnnnnnnnnnnnnnnnnnnnnnnnnnnnnnnnnnnnnnnnnnnnnnnnnnnnnnnnnnnnnnnnnnnnnnnnnnnnnnnnnnnnnnnnnnnnnnnnnnnnnnnnnnnnnnnnnnnnnnnnnnnnnnnnnnnnnnnnnnnnnnnnnnnnnnnnnnnnnnnnnnnnnnnnnnnnnnnnnnnnnnnnnnnnnnnnnnnnnnnnnnnnnnnnnnnnnnnnnnnnnnnnnnnnnnnnnnnnnnnnnnnnnnnnnnnnnnnnnnnnnnnnnnnnnnnnnnnnnnnnnnnnnnnnnnnnnnnnnnnnnnnnnnnnnnnnnnnnnnnnnnnnnnnnnnnnnnnnnnnnnnnnnnnnnnnnnnnnnnnnnnnnnnnnnnnnnnnnnnnnnnatagttggctagctaatattagctacaaaccattagcaactaatgctatataaaatatttgatatttatttagtaccttaaatattagagcctgattggttgataaccattttttttgttgccaaaacttgggcaagcaatttttggcctctatttggtttattgccatattttgccaacatgtcatgtttagcttattacttattccatggcaaatacttttgtccaacttttctcaacattttgttatcaaatctttatctcgaaaattttgaaagctaaccaagccgacccttaataatatatattttttgacataaatttagtccaatttaaaattttatttatgacaattaaaatgagactcttcacatgatgtacaacacagtagtacaaaggcaaccgctactacgtgatatttaaaattagccctaatagatggctgacagtagaaggacaagagtgagattaatcctccaatcatcgcgcaaaccaacccaagcatggcttcttccaaagctttccaccaccaccttcttcaacaagcgtcaaggtgaagcgtagctcgccttccttccttccactgcagctccttcctccctcctctgttttccctctgctcccagttcaaaccagcagcagccaccaccttcttcaatcttgattcttcccactccactccactacaaacgtgccgagcaagatcagcccgcccgcgcgcgcacccagtcgggccgagccgctcgcatggcgaagctggcgtcgtcctcgacgttcgcgctcgacttccttcgccgcctcctgtgcgcgcacagcgccgacgaccgtccagattccgccgccgcggcacgccacacgtgctgcacgccggagatggaggagccgacgaggagcccctgcattgtggccaggctcatgggcctggacgcgatgccgcccgaggcgctggcgccgcacgcgcagctccaggcccagcggacgcccccgctgcggcggagccgctccgcgagctcggccgaggggtcgtcgagcccctgggaccgagacacacagcagccgcagccgcgagtggtccgcgcgtccgcgtcgctgcgggagaggccggcgtacctgaggcaggagagcgacgagttcttgctcctcagcttcagccccgatgaccaggatccggaccgggagcgcgaagtcagggaggagctcgacttcctgctcgccgccacggaggccactgccacgaggcgcggcgggagggtgaggtcggacgcgcccgggaccgggagtaagcagaggaggaacgggcgctgccgcaggctgcggttcgccgacgacgaagcggagtcggcgggccgcgtcgtcctccgccgcacgaggacgccggccgcggagtgcgacgcgcactattccagcccggtgtccgtgctggaggcgcatgacgagtcgtccaccaccaccaccaccacctcgtcgtccttggaagaggtggagcacgcagagccctgctcggctacctcaggttcgtcttgctcgcttcctcaacttcatatcagaatttctgttcatctccaacaatctatcaagctacaaaaatggtcagaaatgtacacgagaattgtggttcatctccagcaatctttcaattttttgtatcatcaaaggccttgtttagttcctgaatgaaaaagtttcgtgacactgtagcactttcgtttgtttgtggtaattattgtccaatcatagattaaccaggctcaaaagattcgtctcgtcaatttcgaccaaactgtgcaattagtttatatttttatctatatttaatacttcatgcatatgtttaaagattcgatgtgacggggaatcttgaaaatttttgggattttaggtggaagtaaacaaggccaaagtctactagagagagaaaaaaaacagattctgtcagaaccgcagttcatttacaacaatctgtcagacttgtacagccaattttgtcaacaataactgccatgagcatgttttttttgtggtccatgtttatgctgaactatgaagcacttcttctagctatcgatctaatcagtccacgtctccaaggcggtgtaatccaagtttctgaaacttcattttcacttcatcatctcttcatggtttgccttgaatgttgtaaaagctgtacaaaaaaaaggaaaagatgttcatgatagtaacccttccccagcgaattctactagtgctagcaaacactgtagctaatagccacttgacatggtccaaaaaattttaaaaaaggaaaagtcatcacaaaccagtacggatcaccatctgtatgaacggcaaactgcagtgttttgtcaattgtttcacattttcagtcacatacatctgtatgcagtgttttttttgtggtccatgttttaagcacttcttctagcttctgatctaacaatcagtccaagtctccaaggcgttgtaatccaagtttctgaaacctcattttcatggcgcttcattatctcttcatggtgcgcccctgaatgctgtaaaagctctgcaaacaaaaaaaaaaaggaaaagatgttcgccgtagtaacccttactgaaattcgagatagctaatagtcacttgaaatgatcccaaaattcataaataaaacgcaaaaggatcatcatctgtatgaacggcaaactgcagtgttttgtcaatagtttcaaactttcagccagataggagtaatgtcgcgtatgagctgtttcttcctgctactgacagcgctgttactgtatccacttactgcagatgaacctcagacgatattggaacatcggaactcaaggaggaagctgcatccagacttcttccagttggacaacatgtcgcctccaagaagctcctgccatgtctcaagatgttcagacagggagaggaggaacaggagagtggtgaacaaagacgaggtgatcacgccagaagtgtctggtatctggcaaccaatctgtaggctggtcgaggaaggtctcaagaacatggaatggctaactctggatggcgcaaatgttgtttccgagatagagtatggcatccttgagcacctcatatgtgagatggtggatgaactcgagggaatgtctgaaactatacatcctttcccagtccgatctatctcttcgaaacaattgggtggcaagaatgttcagacaagacgtgctactgaacaaggttagtttgatgtagtcctcattcgctgacctatcacaacataatgttgtgaaatgtgacaatagtctggtttaggttaatatatcaagatcactgaaacaagtgaatatatgttaacatagcagcaggcgtaggtacagatattgctgaacctggagatatcaggaactgcactctctgctctctgtactgccaaggtctgaactctgaaactgtacatgattttactttctactccttcgactccatgtactagcacctgaataaacgaatggcgtctggattagtttggaacaaagtactgcaaataatttctcttgtgtcaggtgcgtgctggtaaaaaaagttgaatttctggtttcgcaaactccagtaaacgtaaaaccaagtttctatgataaaagtaaacaacctgtgtagtgatacaacttgatgtatttctttctttagtaaaatggtatacatcttttctgcattcttgattgtgaatgtaatgcctataaagaagtccattggtgatccaaatattttctgttttcgcgggctctgaaattatttgatgaacgaagaattattcactttgttgcacaacaaagcggggaattttttctctctagaaaaaaaagaacaggcactaaggccttgtttagttctcaaaaaatttccagatttctgtcacatcgaatcttgcggcacatgaatagagcactaaatataaattaaaaaaactaattatatagcttacctgtaatttacgagtcgaatcttttgagtctagctactccagaattg

SEQ ID NO: 4906 - DNA, 6103 bp, Sorghum bicolor
tttctcgttcatgcgttctaaagggggcttgggatctctttgaaacatagaataaatcatacaagatttttatttttgttcataagctaaaagctatttgtagttattaaaatgaaaaagatgaaattacaattgaacaatatgatatctgaattggaaatggatccgaacacccaatttccatagtgaggatatttggatctaatttgatagatgatgctagaaacattggtacctaatgatgatcatccatctaaaatcatgagtggtcctagagctaatcaggtgcaacatcactaagtagataactcgacaaagggacgaagttgacccaaaaagaaatgtttttgaactaaaatgcactttggtagtttatttattaaattgtgcccaaaatataaagttcaaggactaaaccggccacttcgatagtttttagataaaactggacccaacagaaaaaatggaactaatatgatccttttgaaagtttaagaacaaaactgagccttgagtaattgaagggccaatactctaataggtaggccttgtttagttttagaaaattttgcaaaatttttcagatcccatcacatcgaatcttgcggcacatcaatgaaatattaaatatagataaaaaataactaattgcacagttacctatagttttagagacgaatcttttgagcctagtgaatccataattggataatgtttgtcaaatacaaacgaaagtgctacaatgtttattttgccaaaaaaatgaaactaaacaaggccgtactcgctctgtctaaaaaggaatgtgcatcatctagtttctcaagaattcattttaaataaattactagatatataaaaaatggtaatacttatgatgcataataaatatcattaaattagtactaaaagtatgtttatattataaacatatctagagatacaaatgtttatatttttttataaaattaactaataaagaagtttgatacatgaaaaaaaagaggtgtgcattattttttgggacagtgagaaatagtaaaatactataatattagtccttctaacttactattcggtcatatactatatatatatatacacgtacgagtagttactctcatcttcaataaactacattatgtatgtattcatatttgtttatcagtttgagtgtgtttataaactcatattaagatactgtagatcttaccacgcgaaaatttttcaaaaaaaaattatattttaaatatattactaaaataccactactatattatataaaataagtataaccatatactctatgtatgtatgcatacttaacatacatatcatttcaggccttgtttagatgcgaaaagattttggattccgctactgtagcactttcgtttgtttgtggcaaatattatccaattatagactaactaggatcaaaagactcgtctcacgatttacaggtaaactgtgcaattagtttttatcttcatctatatttaatgcttcatgcatgtgtcgaaagatttgatgtgacggaaaatcttgaaaactttttagtttttggggtgaactaaacaagacctcactgcatctcaatcatacttgtgcatatcgtagaatgcttaattcatctaacgtacaacctcatatttgttagtatctgtgtctgtaattaggtcttgcaaaaaaaaaaaaattgaagccatatctacagatacatacagatacgctggtattctgagttctgaccgtatcgcccacctcgcctcacgtatctagtactggccaaggaggggcgcgccacgcgggacgtgtgctgcagtgcgccgtgccacagaggatccatgtcagcacgtggcgcacgggccccagcgaaaaaatttcggagcttgccgcgcgccgcgcgcggggcccacacgtcagcacccgattttcaaacccagctagcatctcccccaacaacaggccattaatttccgggatcctcgttttcgtttcccttcccactccttcctctccctctctatcagcgccgctgctgctcgccggcgccgcctgccaccaagccccggaatccgcggggcgcgggggaccggaaacgctcgctcgctccccctgttttcctcggccgtcggagcgcgtcgtctccgggcagcagcagctgcagcccccctagttcctggtggttcttgcctcctcgtctgggtgtgagtgtggtggaatagcgtcgtcgtcgtcgctggaatccgcctgcctgctccgcctccgctcgcgctggaggtgcgtggttcttttccgccgccgccgcgtcctctgttcttgctgagttgttcgcctgcgaccgtgattgccagctttcctttgtctgcgtttgcacccttctggtcccctttcatttctatcttgggggtaaaatggtgggaactcggaagattttgagcagcggtagctggtgctctctgatccgtttttctcccactttgcccgaacgagtgaactccgcagcaacgttcccaagtcggacctgttcgtgtgcggagggccctcgtcgaaatcatagcagtgaagagatttttctagcccctgttgtggtgtgggaaaaattgcagttttttcgagctgtatgtacctgtactaggagtaacgtcagtagattcagtagtcagtactagtctactagagggttctgtcaaattctactgcatttcttctttgggtgaagaaaagaatcttcggaaaatttgaattggtttgaaattacaagttgcttttgtcctcacctcgttgcaagcactgccgaagatgcctttactaaacaaggcctttactaaacaaggccttacttggttggtcctatataagttattttttttacagaacagtacagaaagggccattgtttagtcctctggttctgtcagcatgcgattaacctatatactgtgatgaatcacgttgactctgtgcaccaaaaacatgttactcctaaacttgctgcgcagtgtgcgtaggttgactaagcatgtcggcacgtaatttgatccccgttttttcaagtctaattaatgacacgaacaagtcacttgcagcgtggatgatatctgtttcctttcctttgtttgccgctccgctgtcaatacaatatttctggagtactgaaagctacgcttctgtcatttcactgccaaaacaaatcggcttgtcctgaagaaaaatcgtttatctttcactcatttgttttttaattttttgcagccaaagctactgattggcttctaccgaccagcgaagccaaagagggattcttgggaggcaatcagaggtgtttgttttggtcaaacaaagctcagctcccttctctgtcttgcccatgggatgcttgctgtgagctgcttgtgttcatacttgttgagagaataaaacagtatagcatcttgcggtcttgccctttctgattggaagagaagagaaaacctgctgttttgtggcctgctatgtctatctcggagaaggtggtgccatcatcatcatcagtttcttcgtcgtcagatttggatccgctgttgaaggatcttacggagaagaagttgagctttaggaggaacgtggtgtcattggcagccgagctcaaggatgtgaggaacaagcttgcttcccaggagcagctgtttgtaagggaatctcaaactagaaaggttagtctgtaatttgtaattggtaccttcggggctgttggtggagtttgtgctgactaggaaaaatcttagcaggttgcggagacaaaagcgaggagcatggaagaggaagtaagcaagctgcagaaatgcttacaggacaaggatgagcaactgcgttcatccacaagtagcacggaacaggtaaagaactttcacagcaaaatataccacttgcagtttattggagatatggccttaaattggtcttatttttgtttactctgaatctccttatgataaaatttaaataatatgtccagagcccaaaaggtgttgactttaatatgacggcaacaaattggagtcaatatttttgcttgcaaaattgctttctttggtcattaaataaaatttgatcaggaaataaattttagcttgactttgttttcctgatttgattttttactaatcaacttggtcaggctacttaattcctgctcttcgtggcattatgtcagtggctaattattttggttatgccaaatatttcctttactcgggcaagccaaatgcagtttcttaataatgtgttttctaattatatacagtacctccatgagttggatgatcttagaacacaactgtcatttactcaagctacagcagaagcaagtgctgcatcagccaagtcagctcagatgcagtgcttgtcattgctgaaagagttgaatgagaaggacatctcactcaaagagcacgaacttcgagtgaacaagcttggtgagcagcttgatcttctccagaaggatctgcaagcaagggagctctcacaaatgcaacttaaagatgaagttataagaattgagaccgacatcatggacgcagttgccaaagctgggtctaggtctgacaaagataatgaactgttaaagatcttatctgatgtttcaccaaggaatgtccagaacctcaacaaccttttgaatgctaaggatacagaaattgcgaggttgagagaggaaatcagaatattgtctgctcactggacgaacaaaaccaaggaacttgaatcacaggtatgctctatttcatttatccataaaagacctccataatttggttacaaatactttgtttcctatagcacggaattgaagtatatttacatgagatttattgatttttgagcagttagaaaagcaccggagaactgatcaggagctgaagaagagggttctgaagcttgaattttgccttcaagaatctcagtctcagatgcgaaaattaaagagggtatgctccttccagttccataaggagaacagattaattttatgctatagttgcttgttagcatattctccttccggttccagaattgttgtcatttcctttgcttgttagcatacaactagggaagtatatattgatttgaacactattttctattaaacataaacaaacatcctaaaaaaaaggtatatttcaagaaaaatctgtgcatatgatcttcaagtttctaaactaaataccataaagttattggtaatcaaagtttcaaaaagtttgactcaaaccttatccaaaatggcaattgtttgcaaaccggagggagtacctggaattggtggtgtgactcaacattttagatgtgttaacatgtgaaccaaccgtcctcactaatgcagttggccataattgtgtgtggaaaatattcatatcaatggtctgatcttgttcacatttattctgcagatgggggagaaaagagacaaggctctcaaggaactcatggaccaggtggccatgaagcagcccaacagcatgtgccatgacaacaaggagaatttttgggagagtcagggattcaagttccttgcctctatgtcgatgctggcactagtgatcctcgcaaagcgatgaatcagcatcgtaaacccaatctcgtgtaaagaagttagagattccatctgtcgttaggtgagcaactagctcatagtttaagcagatgtcaatgtagcgtttacattagtttggagacttgggcagctgcgcgtactgcatggtcagatgtctagaccaaaatttgccgacatccaatcctagtctgtagactgtaatagtgcagttactgctggttcatgtaaactcataagctgtcttgtagtcacagctagttcatgttagctcatgagcagtcatgtggtcatgaatctacattttataatttcagagtagcttcagcagttgtcagcgctaaatctaattagctatagtgtgaggcctgtgaccatttatatcttggggtaagctggtaactccagcatgagtattgcactcctattcctaggctaatttgctaaagtacatgatgctttatgtgcacaagcgtaggcttggcagcaatcattgcaacagaatat

SEQ ID NO: 4907 - DNA, 2976 bp, Sorghum bicolor
tacaacctttttcttctaaaaaccttgatttgttaactattactatagttcggttttgatggtactgatagggaagtactgactgataatgttcactttgtgtttgaagtaatagttactagtttactgctgtttggcattgaaatcgccttgattctgcttttcctttttgtgtatcaggaaacggaaagaatggtacctgtatgagcctgttgtcgacgttgtagctagtgaggaagatggaaaagaggaggttaataattctagtaggtgaggatagagctggttttcaacatcccatatttagatcagtcagtttggtacctgtacaagaaaaaaaaaatattattcaagccattattttgtatcccttttagttccatgcttgtcacaataggaagagaaagtaacgatgcctaagctgtggtttaattcatgaacatttttacagctgaagggacaacataacatttatgtttttttcacaggccaaagaaaagagcagaagaagagaaagttgccagtcttcagtccctttgattcagacccagaactgcattcctgacgaggattgttgaacaagttgctgattgttctaaccacgaagggttttccttccaatcccagtttgtcgtgggatgatcgaacaaagatgcctgcctgacagttgtcgtaggatagctatgtatatgtatgccgtgagtgtttctccctgatgctgtgtcgtggttagtgctgcctgtcatctagtctgaggacacccgtccagatgttgtatactgcttcggtcttcagtaacatatttgcagttttagtgaaaggtttcttggtcgccaactcatgtttgtgtaggtttgagcgaagatcttgaaacatagttgtttaaatccaaatctatatggtgttgcaacaaattaattagcaggcgataaaatcttctatgttctatgtagcaccatggatcgtaattagtatccatgaacattttgtttatatgataatatgaataacaaatcataggtttttttttttgagaggaaataataaatcatatcataggtagattcatgtgtggttggagggtgtaatggcccaattctcaagcttagctggctgggcccgataaccgaagacgcttgggccatcggttgggctagaggagcttgctgctcttgtttaattatttatacgtggaaaaagtctaccttttctcccccaattttcaaaaaatctacttttcctccctcaactctacaaccaaacaaataacctctctcaacttttttaaaccatgcataaaacattaaatatagataaaaataactaattatacagtttatatataacttagaagacaaattttttaaacctaattagtatatgatttgatactaattatcaaataaaacaaaaatattacagtaaccaaatctaatttttcacgaactaaacaagcccttagatgctgtagcttactcccttcgtccataaataaatactacacgtctcggttctcgaagagtcaattttttttttaactaaaaatatatcgaataatatcaatatttatatatctataaataagtatattatgaaaatatatttcgtacacaatctaatgatatatattacatatgataaatatcaacatatttttacatatttggtaaacttaaaagaaaaaagacgtgtatttatccgtggactgaaggattagcagcgaaggaagcaggcacgccgtgtggggtccactctagctatctgtaaccccggccctgcgcgtcggcagcgccagccgcccacggtttgccgtccgtcgcgggagacgtcgtatcgtaggcggcaccatcgatgcatgggacgtgtcctcttgcttgctgctgcgtgttccactggtggtgatagagatggattctacgctgtctccctcccggtccgttctgtctatatataaagtgaagcacgaccaccagccagagccggtaccagggcaagcggaaggaggaaatcaggaagaatccgatccatccaactatccaagccaagcaaaagcaggactacagggaggatcatcggccggagtactgcgtccgtccatcgatcgagtttcaccgaagctagcaaagcagatcgagaaggcaggcagccatgtcggaggggacggccaactgcgtggacatcctgatcgccatcatcctgccaccgctgggtgtgttcctcaagttcgggtgcgggcaccagttctggatctgcctcctcctcaccttcctcggctacctccccggcatcatctacgccgtctacgccatcaccaagcagtagtagtcgtcgtcgacttgtgtgtgtcgctgtgtgatccatgcatgactagcattgcctaaatgcctaaattaagatataagttgagaatgtgtattattctagccaaacttccatgtaattaaaacagaatgtattgtgttgagacccatgaattaagcaagagtaagttattaatcctcaccgccttgtccagcaccactgctgctgaatgacagcaggacgacatcctcactcgatcgtcggcatatcttcagtaaatcgaatctgccgcaacacctcaacgcataataagtgggagacagaggaaccctcttccataacccctggtgcagcagcatgatgctgttctgtttccaagggggaaaaaaaaatgacatttttcaagacatcacgagatgacatcaacaaggtacgtaattaacaacaggacggtgagcagagtatacgcagcggctgcggctcatcaggcaggcgcgcgctcggccagagctcgatcggcgagctatctgtgcggctttgctgcgcgcacttgtgcgagaaagaggagggccatgcgatcgagcgaggagagtgcaggtgcagcccgtgcgcggcctcgcgcgtcgttgctctagctctaccacgctgccgcggccgcgcgccgtgtcgtcggcg

SEQ ID NO: 4908 - DNA, 3863 bp, Sorghum bicolor
ggccactgtcacagggaaaacgccacagccaatgtacatcgaattcctcagctctccctcaacggcatatagtcgctttgacacgagagaaagagatttaagatcacttggactggtaagccgcttgacaatctctgcaagcagaacctctgggagatcatccattgagcaatgcagcttggccagtttggcaatctcaaggtgttttaggtattcagaatgtgagactgaaataaaggagatggagtttagtatgaaggattgaagataatcaaatcatggcaatgaaattaatcaaagaagtgaaaatgcatatgaaaatgttttgaagctattaataacatattaaaagctcttctatccatcctaacatagaggctactactgtccatcctaacatagaggctactactgcccatcctaacatagaggctactaattgagttaactcagcaacatcacatagatattaattaggaatagattatcggtgccgaatcattttccaaattcaacttcatttttaccaggatactgatcagatcatgcaagtggacaagtggtactccatatattgaattgcgaaacacattgtgtgcacacaaatagatgaacttttctttagataacatatatatgaagcaatatagatcagataagaactaagcagatcatatagaggagcacataatgatcagatatgaagctaagaaggtcacacagaagaacttttgtgccaaattctcctacatctcctagaagccatgaagaagaataaattaggcagcacactaaaaggttcatatgcctacctggctacctcgtcatgaatgaaaaagatgaacttgggcatagcctgttaacctatttatcgagccataaatcgcagagcaaacatcaaggaagcgagaaacacaccaaactacacaagaccctagtatgcacattccgctcaaaaagttaaaacaaaggaactagaaattttagataacagaccacttagtccagcttttattaaaagccgatatatggcagttcagaactggggataccagctgtttacagaatatgagttgaaaacagtcacaccgatctcgaccaactccaaagaccactaacagccataagcccataacattcctggaagaaatgacagcgaaccaccacctgtccctccctctaaaacagcacaagcaccaaagcaagtttagacaagaaaacaaatcattgccagcaacttctctgccgtccaaaaggaactaccgaactagaaattgaatggctaactagacgaacaggcaagtcatctccatatttgggaaacgcctacccaatcgcatcaaaatctgtccccggaaacctcaaacggaatctaacaaatctatgagggctgccaagcgactcctgtacgatcagccacagacgaatcgagcctactccatccattacaccgcacagcccggggccggggttatatactacagtataatactaattaacaaaaacaagggatttcacaacgccagggcactagtccattccgagatcatcagagcaaggagatgaggaagaatccagcgccataccacaagtaagaagagatcccgctaggtctcctttggggcgggcggagacggttgtgccgctacgaagcaggcagcggcggcggcggcggctgcggctgcgccatgagcaggacggaccgcgagaagaagaagaagaagagcacaacaaaaaccctctcgcctcgcgtccccgaatggtgggcttaattaggcttgttttgggccgacatgggcctgtccgttcgctctgttttttttttttttttgaaactccccgagccaaaattagcagggaacgaaggggaattaagaactgcgtggcgtgtgtgtgattggcgccacgcggcttatcttgggaaatcccggcggccaatcacagccgcacatttgcttgccccgcccctccatcatcgccattcgccagccagtcagtccctactgtaccatcactccctcagctagctctccgatccgtccaccaccaccagcagcgagtacggacaagaccaataatggcgctgcgcatacccaccatctcctcgtcccacgggctggcctcctcgccggcgccgacgtgccggccggctgtcttcttggcggttggcagcagcagcagctgggcggcgggagcccagcagaagaggagcctgctgctggcgacgacgacgacgacggcctccgagacgaggggagctggagtcctcgcgccggtgaggtcgagcgggatcgagacgtcgacctcggtgggagctgaggccgtcaccgggcaggtcacggaggtcaacaaggacaccttctggcccatcgtcgaggccgccggcgacaaggtcgtcgtcctcgacatgtacaccgaatggtgcgtactggataatattttattttatactactacaagattatatgacactgtaaattgtagaatctgagactgtaaattaagtgcaaattgtagaatctgagacgacagtagtgttcgatcatttgcaggtgcgggccttgcaaagtgatggctcccaagttccaggagatgtctgagaagaacctggatgttgtcttcctcaagctcgactgcaaccaggacaacaaggtgatcatcagttagctaatatacctacctatgatatgattacttagcttggaccctttgacatctatgatgatctatatctatatcgatctcttctcgtctgtgtctgtatttttcgttcgtcagtcatcgatcacgtactgctagctgtggaatatgtatggcatgaataaatactgaaaagaaacccctgctggggcgctgtatttgtgtgccacttgctttgttgttggttgcagccgcttgcaaaggagctgggaataaaggttgtgccaacgttcaagatcctcaagggtgggaaggtcgtcaaggaggtgaccggcgccaagatcgaggagctagcgcatgccatcgacacactcaagtcaggctgatctcacaagaacaaagcaaaatggcctcagctagctagctcatcaaagcaagatcgatccatccatacatgtgggcgaatgaactagctagctagcgcgtacttgatgtggtactagtgtagtgtagccaccacacacgtactgcacatcccttttgtgggagtagatacatgcatgcagaaacacatcaagctattctagttcttctgcttatgatttatcgatcgcgatcggtcatcaggaccggcaaatacacaattattcattgttatattggatggagtgctatgctagctcgttgtaaataaccatcatcaggttatcatcttctctctcttgtctagctgcttcagagagttcagagcatttggctttctgatccttggaggaaagttggtgtgtgtgtgtgtgtggtgcatctgattattgattatcgatacgttgttcctctgttatgcgatgtcaggttctaatggaatctagaaatcatttatcctgaaaatgcgtatgacgcgactcttgggaactgcaagtatgcatactgtgcatataatatgatttcattcatccaagaacaagtgtagtaacttgtagtcagattcccttctacattacggcatgccatccattacggttggtgcagcagtgataatcccccaaaacttaaattcagacagccttttcatattaccaacatttggtttcccttctacatggcaaaccctcataatgcactggagcttggcctcagattccattatcaaaatcacaaaaacaagttattccagaggcatattcctgcaccgatctcgaaaaatcactatcatcccacgatgc

SEQ ID NO: 4909 - DNA, 4929 bp, Sorghum bicolor
gcctttcccatctaaaaaatttttattcatcccatcgaatctttagacacatgcatataacattaaatgtagataaaaaaataaactaattacacagtttggttgaaaatcacgagacgaatcttttaagcctagttaatccatgattagccttaagtgctacagtaacccacatatgctaatggcatattaattatacttaatagatttgtcttgcagttttcagacgagcttttttttattaatttctaaaaatccctcccgacattcttccgacatatccgatgtgacactcaaaaatttttcatctccaatctacacaggtcctaaggcctcatttggtttccttcgctaaagtttaactcccatcatatcgaatatttgaacatatgcataaagtattaaatatagattattcacaagactaaaaaatacaggtatagagtaatttacaagacaaattttttaaacttagttagtccataattagacattaattaccaaataaaacaaaaatattatagtgtctattaaattttaacacctccaaccaaacactctaagtagaccaacgatcatgctacgatgctaattaaacatgtttctagcagagagcacactaagatatattgtaagtttatatgaaacaatatcaacaaccattgtctataagtagatttattgatacttattttgacattataaatttttggttttttttatatctaattaaatttaaaactgtttaccttctcttgttgttcccaacaaatataagtcttgttaacatttttatttgtatttgataaatattgtcaaatcataaactaaataggattcaaagattcgtctcacaaattacagacaaaccgtgtaattagtttttgttttcgtctatatttaatacttcatacatgtgctgtaagattcaatgtgacaacagggccgtctcaagaattccaagggcccttgggcaagcgagcaacaagggcctagcaaaccaatcttttacgatcaacttcctccattctaaattataagtcattccaagaatactagagagtcaaagcattttcaaatttgaccaaaattatagagagaaatactaagatttataatataatgaaaatataaataaagaagaatctaatgatacttaattgttattattataataatcatcattttatcatataaatttggtcaaacttaagatagtttgactctccagaatttttggaatgacttataatttaggatggagggagtaattggcatggctccgactgcggcatcagctttaggaggatgatttgttttctggtgaacactagaggagctagagccgtttttgaaactgaatgatgggccataatttatggcttctaccaaatgcttcggaagaggcgtcatttcaaataagaccttaatatgataattaaagtatacagtactagtaataaaaaaataacttacaacatatattagaagcgattaggagtagctgaatatcataatagcaagtgatgcatgtatggatctttaaaatttcattttattggtcaaatatattactatataagtattatatacatacataaatttatgggctccctccgtggcatgggcctatggccatcgcaccggctgaccataccctgagacagccgtgatgacagaaaattttgaaaatttttagatattttttgaaaaagccataggtttgtgttgatagaaaaaagaacccaccgtcaccgcccccacgtcacatccccaccgcccacccaccggttcgcaggccccacgccataccctgccccaaccccagccacacgtggcagccaccgcccttctagaagccgccacgtcaccacgcgcacgcgttcgcccgacgccacaccagtcgcccagccgcgggaaacggaagcagctcctttccttcccaactaagcaattcatttatcataaaaaaaataaaaataaaagtcattcgaaccgtcaatgaactgaattcgccgcgagtttcctacctataaaaccaccctccccgacttttcctcatcacaatcaaccaaaatcaaaatccccccgacacgagagaagaagaaaacccagaatcccccgacgaagcgaaatctcccaaaatccctcctcgatccagcgagccatggccgattccaccaccaacgacgccccggtcgtcaacagccagcccaccacggaggtaagcggcggcgctcgttctcgattctattcgatttggccgggttctgagggcgtggaatctcatggcgcggcttgtctgatttggtttggtcaggaggaggtgacggtggagagggcggcggcggcggcggaggaggaggaggagaggctgcggtacctcgagttcgtgcagcaggcggcggcgcaggcgctggtgctggcggccgcggcctacgcgtacgccaagcagggcgcggggccgctccgccccggcgttgaccatgtcgagggcaccgtcaaggctgtcgtcgggccggtgtatgaccgcttccatgccgtcccgcttgacctcctcaagttcatcgatcgcaaggtaaggaggagggggtctcttgtctgatttgttcctttttttttctctttgaatgttgaaattgtgctagaaattaggcgatgagttcgatgaaatggaatttgcgggtgtaggtttacaggatggaatttcgtcatttttttagttataaatcttgtcaatttagccttgtagttgagggtttggattgtttgttctatatgatgttaattgacctagcaaattggggtttttttgtaagtctttgacaactaagactagcaaattggggattttgcaaggcagaggcaagattgatgaaccaaacaaaatgcatttagccaatatttgaggcttattgcttgtgggttataagcactcacttttggctagttttaccaagaactttactaaattggtgtaaacactactagcacgcacatacactctggacaagtttgttgatgtagttgattaatcagcacggtccactaacctgatgtttgagggacgtttatcagcttgaatttgcctaactatgtagtgttgtcacttgtgctaaggatattggtcattttaggtgatgtttcagggacgtttaacagaattttcctatccgtgtagagttgtcacttgtgcaaggatattgattatttttcatgcacttcgttttaagtctggatgtttcgttagttatattatcccttgtattatattgtatacgcatattgaagtcactgtttttctcaattacttgcactgttttgacatccattttgtcttgctgaacaaagatgagattgatttgcacgttgtcccctacttgcaggttggtgagtccgttgaggagatagaccgccgcgttcctccagtggtgaaggaagccccaacccttgcccgctcggctgcaaaggaggttcgtgaggccggccttgtgggtacggccacaggccttgccaagtcagccattgcccgcgcggagccaaaggccagggagctctacacccgctatgagcccgtggcagagcgccgtgctgcggaagcctgggtggccctgaaccgccttccgctggtgccttcagtcaccagggctgtcctccccacagccgcgcagctctcagccaggtacaattcagcggtgcgtgatggtgccaagcgcgggaacactgtggccacctatctcccgcttgtgcccactgagcggctcgcccgggtgttcccgtaccccatggctgatgttgccccagcaccagagatgcagcctatcccctcccagtagaagatggaatggaatggaatggaaactacataatcaattatatcaagtatgaactcagatgtggtgtagcaagtattactgtgtaatgtctttatgtttcctatggtgaactggagctctcatgcgtggtttagtgtggtggcattgctgcttgttacaacttgcaatgagcctacacaagtttatctttgttctatggataatgatgtgtaaattaatgggtatctattagaattatatatcaatgttgatgtttctgctttgtcatctgtttttagatctggctcttacattgggggtgtacttggttcgttgtgtttctacaatttgagtacccaatggccaatttgtatttgcttggctgttggtgtgtagcccaggattgaccgagactgaccaaatgaagagctttgtttggttggattctggttccaaacctgcctagcaaaaaccatgtcaagctgaattcatggtaagccaaaataagactgaccaaaatgagggcaaaaaatgaaggcatgtatttggtttagtgccaaaatatgatagccaatatccttttcccttttgtgagttttaaaaagtttctggaaacttactgtggttttggccttaaaaattggcgtaccagtttttttggtactaaactaatgatagccaaaatttctaggtatgctctgagtttgacttggcaaattggatcctaaccaagctttgccactgtataattgaattgtttgatagccaaaatttctaggcatgctctgattttggcttggcaaattttggaactcaaccaagcagaccaaaatgttgaagttttcgccactgtataattgaattgtggacattcgcattcacatggaactatggaagtttcttattagactgaacattctgattagaagagcacgtctgtaatccaacgccagaaggacggagattcaggctttgcgctagatctaaagtctaaacacagaatgtacacttggaagaacaaccatagaactcataataatagaacagatcaatcttattatgtggagatcatagtcctagctgaagaatctgtacgggatcaaatgttctcatt

SEQ ID NO: 4910 - DNA, 5297 bp, Sorghum bicolor
tgtttttttgatgttgcactacatatttttacgatgttgcagtacatattttttgatgttgcagtacatattttttgcgatgttacaatttttatagttttaatgctgcacttgtgaacggattgcgttaggaacaggggacaggggcgcgatggggaacgggacctaatgaaggaataggacgcggtggaggacggggtgccatggaagaactgggtgcaatgaaggaacagagagggaggacgcggtgggaaacgggaataagggcgccgtggataacagagttgggagcggaggtgaaaaacgagatgcggtggaggaacaggacacggtgagagagcgctgcttgggacttacgtagggacgctgcctactttattttcttttttccgtgtgatgcgggtgggagcttcagcgtccggacacgctgttagcgccggacgtccgggcgctagcaataccgatattatatatacatacaaacatataagcttataataaattgttttgatttcggacttgaattttgtattcgattgattcaggaacaattcgaaacgcaacaaaattatttttcgcccaacccgcaggtctcctgagtttctccatttttcaacggagaacggcggagagggacaaagcacccgtcatcgtccctccgcattttaacgccggacgcctccgcctcctggtttcctcttctttcttcccttcgtcttctctcccctctcaccacgcgctcgccgtggctaaccgaaacacccaaatccaagccaagcgatcgtcgcctgaaaccgagcaagccggagcgcaggagaccccgccgctctcccccccgccccggctccgctgcaggtgagaatgcgccggagcgaacgctttttcctcctccccccatttccgttggtcctttaccaaagccctcgaatgctgctttactttggggttttctcctctcctttttcttttatcctaaaaacaaaaaaagaagaagcaaatatggattctccaccggcggcgtgtgctgcggtgcggcgtggagtcggctgcaaaagaaggggggaaaaaacaaaaacacatttttggggttttcttggagcttgttatcaaaattttgattttttttttctttttcgtctgcacctccgttctggttcgtacttcgattcttgggtccagtctcccttttcctgggatgaatgctcgtgtgctcctcgaaatcgattttggtgctggtggaagagggttttacaggtgaccagcacaaattctggggttttcttggaccttgttattaaaaaaaaataaatcaatgcgcaacctttgctgggttagcttaagcacgtgattccaaggtgctctggttttcttggtgctcttaagcacgtgattccaaggtgctctggttttcttggtgctctgttcctgaagtcaccgcttttgtacgatataataataaaaccccgttgtatagtgtctgtgtaggcgatcccttctttttaataggtctcctgccggttcgtttcaaaaaaaaataataaaaccccaatcccccagccctcgtgctcttaacaagcactgaggtgtcctgtaccttaaccaatatctttccatctgttccagtataacttaattgcacaggatcaaccttgttggaaccaaggacagtggcaggagtgccagactagatgctgtattatcatgtataaggtgtttatcagattgtagtattattgtagttttgagttctagactggaacaccctctagggggtagaaatgtatgatattgagcttccgttactgattcaacttatgctcagcttatatgattcagctctagtgactgattcaacatttcttcaactggtcctgtataaacttacattatgcgtcaacatagtatttctctgttatgtgtgcttctttagcatactgtactactgacaaatggtaacatcgtttttcatactttgtttgccatttctcttaccttcagcaatggactacacatccgatggagattctgaggtcgaagcttatggatccggtacttttgagcttctggaatcaggagatttacaagtgatgactgatgaaggcttgtaccgatgccccttttgttcagatgaagataaggaccacagtctaaatgatctgctgcagcatgcctctggtgtgggagcagcacatgatcggcaagccaaagagaaggcagaccaccgtgctcttgcaaggcatttgaagggtaagcctgctgaatcacctggcgcacgtttgcagccaatgcttatagatgtgcaggatcctgagcatacccaagatgagcaatttgtctggccctggatggctatcctagtcaatatgccaaatgaattctttggtaaaagtgcgaatcgactgaaggagcattactcatcttttcatccagtgaaggtgcatcctgtatatagcaaaggtcgtcccacgcgtgatgctgtttttgagtttgggaatgactggagtgctttcaggaatgcacgggcctttgatgctcactttgcaatgaaagggtacagtaaaaattgctggaaggagatgaagtctgaatgtaaagagcctgttgggtggatggcaagggctgatgattacaattctctaggggcaataggtgagctactgagaaaaaatggtgacctgaaaacattaaaagatattggtagtgaaggggcaaataaaaccgaaaagcttctgtccaatttggcctgcaaagttaaagaaaaggaaatttatttagagcaacttgagtctgagtacaacaagcgttctgcttcacttaacataatgatgcagaagagggagcaacaactccagtcatacaatcaaggtacatggcaatattctggttgtttatgcatgatacccttaggagtgactaaatacatgcagtggtggttactatccattttcaatcatgtgctatctatgactgtactaacggtttttccacttttactagagatcctgaagatgagacaacttggtcaacaaaacacacaaagaattgttgagcagaaccggaagctacgatacgatatgcaggacatggcggacgcacttgatgcaagaaacaaacaaattgagcagtcggagcatgacaaaaagaaacttgagcaggagaagctaaaggtgggcaatttctttcatctgaggcaaaatgttttatcaacaagaatcacataatagcttggagattagtatatacgatgtatttttctgctccttacaggaattagaatcctctagtcatgtatgtcttctaagaatgataaataactttgattgctatttctttgaaaatgaaatctttttgttacttggtgattttatggtatgaaaacatagatcattctacaattagttgtcacttgccagatggttgaacaattctattagggtgaatttgcaagaggtgtatttgtacaggacttattattattatttttggttatctcttgtaaattttaagaactagtatcctagtcaaaatagtcctccaactgttggtgatttggaggaaacaggaggggcagagcccctactgacattaattaattaaaaaaaggttataaagagtaactaacagttacagcaaacagattacaaaaagaaattaggccacttatgatgaaatatttgtgcaacttgtataacgtacatttaacttctgctgtacagaatgcaatgaggaccaatcatcttaggttggctgcattggagcaggagaaagctgatgaaaatgtccaaaagcttgtggataaacaaacggttagcccctgttcccttgacgtgcttgcatgcggttttcttttgaatgacatttgaactgtagagagaaacaaaagctattctagacgactttttgaggttgaacacacagttggagaagaagcagaaacttgaattggaaataaaccacttgagcgggaaactgcatgtgatggagctcaagccaggtgatgaagatccagaatccagagagaaaatagataaactaaaggaggagctcaatgagaagattgatgaactgaaatatgcggaaaactacaaccaagatttaatcagtagggaaagaaagtccagtgatgagttgcgagaagctcgtgaggtgttgataaatgtatgataatttttatgtcataccagtgtactactcagtttgagctagtgtttttgtttatgggaactcatgtttggtctaattgcagtctctgcagagtttgccccgaaccacaagctgccagtcacagatcggcgtcaagaaagttggtgagcttgaccccagtgtgtttctaagcctgtgcaagcgaaaatttccagcagcagatgcagaagctaaaagttctagtctttgttcaaagtggcagaatgaaattgaaaatccagaatggcagcctttcaaggttattattgttgatggaaaagcatcggtaagatggaatctttgccttgtgttgaacatgtatctactggtatgaattgtttatatggagcattgatgctgcacgtgcctgtgtaggaagcactcaatgagggtgacaggaagctccaagaactgaaggagctcggtcaagaaccctatgctgcagtaacaaaggttctgatggagctgaaggatgccaatggcggcaggaaggatccgttccctgagctgtggaactatgaccagggtcggaaagcaaatatggtggaaggagctcggcatgctgtgatgctttggaacgcgagcaagacgaagaagggcaagaaaagccgctgacttcagtgccattgtttcatgctgaatgaattaaggtcctaaccaaatagttattctattttggagtaaactggaagtgcagttaacctggtgcattttgcttaggtattaccttgtatgttgcaactttgaaccaagcatgtccctccctaacgctatgtatgacaaatgatggcatgctggaaccgtgtcgtgctcggactagattaatgcactagttaaaataaattctgcaatgtccggtttcaagtttatgtgaattgaaataactccagtttgcatacttacagcttgcatgacgatagtgctacactccatccaactccagtcacaaacaattgtcacctctatgcattggctgcaatccttaaagatccaattttgacaacaatttaaaactttcaatatactccgatttggagaacaaactaatccagaacatgaacagaaactttttttttccgagtaaacttgtgagcaggactgtctccagtttcatt

SEQ ID NO: 4911 - DNA, 9040 bp, Sorghum bicolor
ttttcacgccaacaggtggttctaggtctgatatacacccttcccatgtgcgccccacaccccccctctccacaatcaagcgttcaagcctagccactattgtcttagtccccatccacctccgtgtctcccggcatcgcaaaatttaggagtgtagattttgaaattcgtggcaacacatgagcataaacctataatttatgtataaaggctcacaaaaaaatggctaaaaatgctaagtattcttctatcatattaagttccaaaaaaacattctaattttggcttttgcttccaaacatacttcttagtacaaagtctaaatcgtagccatcaatcttaactagtatggtgaagataccttgtaatagtgcatactatccataaataacgaaccatattgcacatataaaagctaaaataaacaaaaaaaatactttatagaaacttcttctgcttctttttaaaagcttaggagtttcttatataacatccatgtatattaatggggcaaaatggatgctaacagttgtataggttggatggcccatgagttacattaggcattagaatacttgagaattagaaacatgtctgtctagattgaagtagcaggagctaagtttttactagtccagaatgcattttttttgttttatctagcacattaaataggaaaacactcatttaataaaaaaatatgaaccaagaaaaatgaaatccacttaatctaaataatttagatgacaaaacaaagaaaatgagatacaattgtcgtgttatttttttaagtttgaccaaaatgtatacaaaataatagtatttataacaccaaataagtactattagaataattatgtcatatactccctccgtccccaaatactgctatttctagcagatttcagacagattagtgtggtaaacaaaagactattctaccctcaattaatttgtgttccaccatttaatcatgcacgttaagccatggttctctggttccaacgagctgcatttaatgccaattaaacagactcaaacaattaacatgcgccaaagtactactccctagaagaaattaaatgggctggtggaccacggaagttccgaggagaattaaatgggctggtggactgagtatgctagtagaaataacaatatttgtggacaaaatttttttctaggaatagcagtattttggaacggagggagtattgttatagtaaacctattcagagacatccatgttgatactattttctcttggttgaggttaacaataacttgctccaattacttaaaaaaaatattctccaaacatagaattgcattttagtaaacctactcggagatataaatgttagatatgattttccgtgacatcaaatctttggatgcatatataaaacattagatatagataaaaaataactaactacacaatttatctgtaatttgcgagacgaatcttttaaaatctaattagtctataactgaataataattgtcaaatacaaacaaaagtgttacagtagtcaaatccaaaaattttcaacaacggccaagtattatccatgtgacatgtacaaattaggatggtcacaggtcatgtaaaccagcataaaccacgccagcagctgacctggcgccctttgctaaaaaataagaagaagaagagctgacctggcgcccactcatctcatcagcctcatactacactgacatgcgggtcccatcgccccgcatgatctgggtcatatttctaaaggcttacgaattgtgggtcaagtttcaagggacacgaattgtgggtcaagtttcaaaatttcccctccctcggcctcctcggccctgtgccagcttcgaaacctccgccccgtcgcataaaccccccctcgcctcctccgcccgcgcctgcctcctcttcttcgacttatacgcctccctctcccaactcaccgcgcactagctccccagcctactgtcccatttcgtccgctatgcagtccaccgcggccgtctccgtctccgcctcggcgaccgcgtcccgcggcggcgccagatccgaggccgcgcggcggccaggtggggtccgggtctgcggactccggggcgaggccctagcgtgcccctcgctgcggatctcgcaggtgccagcgaggctggcggtggcgagggccgcggcggcgaccaatggcgcggtggcggggagcggcggcttcgattacgacctcgtcatcatcggcgcgggcgtcgggggtcacggcgccgcgctccacgccgttgaagaggtctgcgtctttttattaagtgctcggtgtaacatcagcactgttttagtgagtaatcctgggatagcggagctgcggaattggtctgccatgggatgcgttagtactgaccagaaacgatagcacgtgatgcctgattggtaattcggcgttagaaatggaaattttgcttgaattggactatcgttgttttttttgtgtatctgataagaattttagatcgatgagttgatgaggtgcctctaggccgaggttggtggaaggcccaggtgtgtacctgtaatctgggcggcaaactttcttgctagcagttaattttaagtttgaaatactttagttttgatgctaaaccacagagtaaggcaatttgcaaacctatgtcttgtctacaaacacttccaaatttgtctgctaatttgggtgcttgttcagggattagcatcgattacttgggtgaatttggaggttttgctgccctgcataccattgttgttcgactgttgttagttgatctagtccgtgctaatttcaagagacaacagtattttcccattttaacctcatgttttatgatagtctagcaaataagaatgatgccaaacattagccataccaataattttctaagagttggtactgcttctatattgatcttgtttcactttgctctaatttcttcagggtttgaaaacagccataattgagggagatgttgtgggtgggacttgtgtaaacagaggttgtgtcccatcgaaagcactccttgctgtcagtggtcgaatgcgggagcttcatgatgaacatcatttgaagtctatgggtctacaggtaatgcggtcagttgaattgggcgagggatttgctgtttcaaataggctcatatagtgcaaaattgacaaaaagctacagctaggagcttgtctgagtacttttgtccattctagcacctaactgtatccattttaattgcaactagtagaattctacttaatctgttcattccaatttcttaatttagagtcaaatctttcttggtgtttgtcagaacccaatagacaaagtaaatctgtaatagacaagggaagaacgtacagtgcaagattcaggttccctggttatatatacctccacaagtttaaaattaacaattaaatttaaattagtcacatgcattaatcttatggatgcaaggcttttagttactatatgcccatgttactctttattaaagtctcccccacccctcacaccaaagaaaaaaaaaacaatttaaacaaggattctgcttgttcgtaggaggcatgtgaaggtctcaaccatttcctatgatcattagcagttcttactcgaacatgttatatattatcctgattgatgctgaattgttaggcatattaccttgtaacaggtttcttctcctggatatgacaggcaaggtgttgctgatcatgcaagcaatcttgcctcaaaaatccgtagcaacttgactaactcaatgaaagctctgggagtggatatattgacaggtgttggcactattgtggtaagttatctatagtccttgattgatgtggaacaaacagttatgtacatgagaatcttatcccggttctttcgccggaggttgataattcagagttgtttgtgtttgtaaattttatctaaaactttgctgtgtactattgagcttcgacaacacttggaggaattattaatgctaaatatttagtgtgtgtgccctatatactgtttttaaattgttaataaataataactatgtttgtccttatttttttaaaaaatcaattatgttgttttttcttaatatgcataaacttaagcaaaatcacatatctataatctatgagtagattgaatactagttgggtatggatcagttaaaagtaaactgtatgatctaaccagaaatgaaacaaactcaatatttctggtgaagattatggcattaattatgtccagtgagataatgcataacaagatcttatccatgaatgtgaaaaatgagctctctgtgtgtcctgatctggaatatccagtgacacttcaaccagaaaatgagctcacaaccagggaaagcaaagggatgttctaacatgttttcactgatgtctgatcagggaaagcaaaaggtacgatatggaaaagccggttctccagataaagaaatcactgccagaaacatcataattgccactggttcagttccttttgttcccaaagggattgagattgatggtaaatacttctctgtttgagttctcttttttgaaaactcaatactttaggaaaggtatggacttatggtgcatgctggagatttattataaaaaattattcatttcatttctgttaaacttcaatacccataatgaggaggatatagatatgaccgtgaattgtagtgtgatagccatttttatttttaatgcaccttatgactttcggcactgctctgcttttcaaaactttctggtgattcatgttgatgcagtcattcctaattcagtgttacatgcaatgctgctttgcttgtctgtttgtttaattcaactctggctattttgcttttcatcattgttagaaagacccaaatgttatactgtttctgcaccaagaatccaatcccaccacattgatttagattggatttggaatcaccagggacaaaaagctaagtataggttgtcatttgttatgtcttgaatatccatatggttatatgcctgtttctagatatttttcagtgttgaactcatactttgagaccaaaaactggatatgtgatccttgtgaccattctgttgtcgctggcacaattgttgtcacatcacaaatgtagcctagaaatttagagcattagagatataaacattgggtgcattctttattgtaacatgtggtgtattagttgtcatttttggtgtactttttccttgttttgtctgttctcataaaactctgccggatgattatttgcagggaaaactgtatttaccagtgatcatgcactgaaacttgagtcagttccagactggatagctattgttggaagtggttacattggacttgagttcagtgatgtatacacagctcttggaagtgaggtacattagaagctcttgctttgaaattatttgctaggttgctttctccaagaaccattgtccacagcaccagagaaactatgaaacttgcacagtgttctggtgttctttaaatgtatctgctgttattttctctgatttttcatcttacctccattgattgtttggctattgtgcaaaatacgattccagcattttgaacttaagtaaatgctaaataattcagataaggtggatggattctagaatgctccttacgcatcatctgcagttgcctgttgaacatggttgttgtgagttaattttcacttgatttactcaattcaaaattgggcaggttactttcgttgaagctcttgaccagctgatgcctggatttgatcctgaaattgcaaaattagcccagagagttcttatcaatcctcggaaaattgactatcacactggtgtttttgcaagcaaggttcacctttggtctagctttctcaaagtattccagacttttttttttgacatggttgaataatctatatgttgaatggtctatggatttttcactagattactccagcaaaggacggaaaacctgtgctcatcgagcttattgatgcgaagacaaaggaacacaaagaaacccttgaggtaacatttctgatatctttctttggcaacttgcttttgttcttgttgattacttttgccagtcatctctttgttatggtataacggtgccaagtggaacacacaacggggctaagtacaacatacataatcttttattatctcgttgtctagagctgcatggctttactgagtgaatgcttcatattggtcctatacctgccatatgtatagttggttgagcacagaattctgtaacagttacttgttacaagcattgtaatcaaaatcaggtagtaaaaatgttttgtatcaataatatgttatgattttacttcattcgaacagaaatgcatgtctgttaggacattgacacaatcttcaaggtgacactttgactaacaacatctatagaacatatattattttatatagaacacaattatattattatgaaattgtttctgtaatgaatgtagtaacgtcaatccatataaatgtaagatattcaaagtcataagtccacttgcaaatgcaaatagtcatcaaaagcaacaatatggtaagcaagaccaagtgcactgtaaatctcattggattgcacataaagcatttctgctagctttccaatttactatttgattctttataagttaaccccaatggctcactcgggaggttggaaatttgtgtgcaggttgacgcagctcttattgccacaggaagggcgccattcaccaaagggcttggcttggaaaacgtgagtatctagaaattaaatctagtagctaccagatcttatgctacattttaaaatataagaatgctgaagcttattttccttttcttaagatcaatgtcgttacacaacgtggttttgtgcctgttgatgaacggatgcgagtcatggatgcagatggcaatgtggtatgttgcaacttttattgcgttacttttttcttgagaacaagtgtctcctcaagatttctgcataattcacatataatattatataggtacccaatttatattgcattggagatgccaatggcaaactcatgcttgcccatgctgccagtgcacaaggaatttcaggtattcgagaattttgttttcttgtgatttcttggagaaagcttattggtgtacttgtctgatgttgaattcctattcaaatgtagttgttgaacaaatctctggaaaggatcacatcctaaatcatttaagcatcccggccgcatgttttactcatccagagattagtatggttgggctgacagaggtaagttatctccttattgaaattgttagacatgtccttcatgcattcctttctaatcaatgtacatgaatttcattggctgaatatttggacatcattttgttaatggccgtattttggtcatttgactaataggcaatgccttatttgtttatttatttatttattgctaattttctgtttttgaaactttctcagccacaagccagggagcaggcagacaaagaaggatttgaggtaaatgttgtgaagactagctttaaggctaacactaaagctttggcagaaaatgaaggagatgggattgctaaggtcattctgtttgctacttcaagttcatgttttctccataatttattttcacaagtttgcactaacagaatttgacaatatgtgctcctcactgcagttgatttaccgacctgacacgggtgaaattcttggggttcacattttgggtttgcatgctgctgatctcatccacgaggcctccaatgccattgccctaggaacacgtgtacaagtgagtgtcgccgacaatctattttttattaagcatccacctttgttggattctgtcatacgcatagctaccaattcatcttgaaccgatacataattgtttctgtaatgcaggacatcaagtttgctgttcacgctcaccccacattatccgaggtcctggatgaactcttcaaagcagcaaaggtatacatcgacgccctcatttcttgttgctatcacatttcttggtccacaaatctgaacaactgcaagccacactctctgtttccaacaggttaattccggtgtttctcattctgtaaatgaaccagttgcagcctagagaagggcgggatagcaagccaaggcagccaccccaaccgctcctgaaggtcctcagcttcctcacgaccctgttttcttccccaaaacgagatcggcaacggtaaaggggaggttgttgttgtaggtagtatctgtaggttacagatttgaggaaagaaattattcatcagtgtcgaaaatacatacaagcacacaaatgtttcttttttgggggtccagattatatgtagagggtcttctgccgttggggtgggtttttgttggcttcgttattgcaatatttgttgttggttgccctgtaagatgaagtgacgagactagctcagctcagcttgtttgaaataataatccatgtaccatgattcaaaactcaggccttgtttagttgttttcaagattttccgtcatatcaaaccttaggcacatacatgaagcactaaatatagacgaaaataaaaactaattgaacagtttgtctgtaaatcacgagacaaatctttatcctaattagtttatgattagacaatatttgcctcaaactacagtgctaaaatctaaacaacttttcacgcctcagatgtatcgtgggttaccacggaggttcccgattcgattcgacaccatggatgtcgctcgcctcaacggggccggtccggtccggaccagaattactaggcactttggcagatccgacacggatatgttcggttggcggcgtaagtgtatttaaaggcagatccagtgcaattgatcgagaagctctttttttcgtgtgatctgttggagccgaccccgacttcatggagggaggagagccagctgccggcggcggcagcagcgccgcagaggaagacaagtacacttgggtgccg

SEQ ID NO: 4912 - DNA, 2797 bp, Sorghum bicolor
cgtcttctaatttgaaataaaggaagaatactaactttgagaatataataaacgggccggcacgaacatagtgcagcaagcaacaagtcagcaaccacagaaagcaataacctacgcaagcaaatgtgattagcttattaggggttgatgatctagctaaacttgtatccatgtgcaatgtcgaaagaccaaccgataaacgcatacgagaactcgagaagaacacggttcactattaaaatggcagagttatcttagtatttttaaatagtaataaaacattgccataagtcatagcatatgagaatcctcgctaaaagacatttggtaggaaatgtttatactaaatttcgaatgctaaaacactagaacaacctcacgtcacaaatataaatttctggttgtggttctgtataaggtcaactttactctccatgtgccctatatgtaatatacctgatgatgagagatgattaattcatccatacatagtacggtctcctcgaccgttgtttgatctaggacacatgattagtagtctaactggccacatgcctccttttactaaccaaccaacacctggttgctcaactgccgtcatatgcacatgagttgcaacagcacgactatgcactaatactaacaactgaatttatgcaacggggatcttcatggaaattgcccaatttgcgcgtgctaaccactaatccctgtaccgaagatcgcggtacggtccccatcgacggctggacacacatgtcatgttgatagtcgatacatatatatgtgtgatcgaggataacgatgcgcacatcatgcatgcatggttccccgttgacatatgtcatgagggggaggaggggaacatggctgaaaatcaaggtacgctggcctaataaatcatggagattattaattgttacatgtgcgatgcatcccattagctagtccatgcaattgattgattggagcatttgcgtctatcataaccagctccccaccggggaacatgctggcacattagtttagagcctgctaataatccatgctgtttattttattttatatccctactagctaacatgcatatatgtagggatcggatgcaccctgaacacacatgatacagggcgacttttcttcacacatgatgcaggctctttgctgcacactttttgctgaggtggcaggctggcaaaggaggggtggagcgcgtggggcccactacacatcacacatgcatgcatggggccgggatacatacagatacgttacagagtgttctgacgaggaaaaattaaaaggcaagtgaagtgcatatagtatagggtagtagtagtgcatggttggtggcgcttcagaggtgtctgcttctgcttggatcgattatagatagatagagaggggtgtgtgtgtgttttgttggttggttgtttaaggaatcatgtggtggcatgtggccatgatgagttaggagaacatgcatgcatgcatgcctgccctcaccttcaagcaatgcaatgcttgcatcccaacaacatgcctgccctgcctctgcctgcattctcccctgtcaatctgcaccgtatcgtatccacatgcaatatatatgatctactagctagcttgctttggatgatcactacataaactgaagttaactattcctgatccgtcttttgtcatgccacctaataattcccccccacacatatcttctcttccagcctatagctagctcctatatagcatctatataaacaccccttgccccccctctctttagcatcaatcccctcatatcttcatctatctccctctagtttatcggattccattcttcgtttctctcctcattatcccatatagtcataactgcaagtagctatacagcctacaacgttttggccatgggtgcccacaccggaagccgtggttgcagcccgtcgacatcgacggcgaggagaagaacaaggccgccggtggcatcctccgccgccatggccgccgcaagaaggccttcaccgacgacgaagccgacgatgagcaaggacgtcgatgccgcggaaggcaaggcgagggtgaaggcctgcagcaggcgacgcgacatggaggtgaggaagaagatggaggtgctgaggcgcctcgtgccgagcagcagcggcggcggtgacggcgacggcgacgaggtcgacgagctcctcctcctgcgcgctgccggctacatcgcgcagctgcaggcgcaggtgacggtcatgcagttcatggtcgacgtgctcgaggacgcaaagcattaatcattttctttcttgttaggcttgagaattgagatgacacatgtgtaatacacaccatatatatacatgatatttacttttgttctgaacctcctgtgttcacgtggttctttatttctttactctttgtttaatgatgcccctgaggaaggatccatgcatcttgaaccttgagcaagattcgcaacaaacaaagtggatcctacttcacaagttgtttccagctctgtgaaacttcaccatccccaacaaacaaagagttgggctaacgtcgtggccatatatgcctactccaagtggatgttgctctacaatgttagcaataaactccgtggctatgtctgcaccgcaaggacatgtcaacgttaactcatcgttgactacgccttatagtttgtgtggcaaggattatgattctagtaccgtttaccacaactgtcgtagttgttgtgtccctcttgcttcgatgcctttgaacctcaagtctacgatcacgcctt

SEQ ID NO: 4913 - DNA, 7288 bp, Sorghum bicolor
  misc_feature (2185)..(2284): n is a, c, g, or t
tgggagcagtggccaaggcagaacagatattgtctcattaagcctcatggtcaagagaagcactaaaactattgaggaaggaggggcatgtggtgtgatgctcatcgtcaaggcataggaggggccatcggatctaatctaggaagagttgtcaactgcgtcagctgcagcttgagtacgaagaggcaagatgccgttgccggctccagagaacacgttaccaaggggtgcacacgagatgttgttgttagcatagaggagaaaccactacaatgtgcagaagatgtataggggttggctgcatagggtcataggtgccgccatttgttgtagaggatgcagaaaacgctcaagtggaggtctagaggactctcgagggtcaaagggaggcaggaagaagacaaaagaggaagacagtggtccgaagtgtttcaccatgcgagtggagaactagagatgggtgatttgtatagcaagggttttgcatccttggggagggttggaaggccttagagcctatttgccatagctcacaacaacttcatgtgttgttttgagctggtttttttttgccaaatatttttttccaaaatagcttcattgataaagctattttttctcctctcacaaagacataagttgagataaaactgaaaaaagtagcttattctagctctgtctcctatttttttctttcatttatgcatgaagttattttgtcaaacaactttttttaaaacagctcagctttacttaaaaagttgctcatgaagctcttttctaaaaaacaacttcactagaaaagctgagttgtgccaaataagatcttagtgtgctttttttgtaaaatcgatctcatgagttacttcggttaaccaagatctaaaatcgagtaacgattgtaattttgattacttaggccagtctcaatggggtttcattagagtttcatgcacattaaatatgctgttgtggcgctatattaatgaagagagagatgataagagtttcatgggagtagagagagtttcatccccataaaactcatatgcactgtttccaaaatattgatgtgttggaaactgtgacatgaaactcccattgaggatggccttagaactcaagaccgaacctcatttcaattttgtctcagttattttggttcagtttctcagattatgcccatccttatcaatgcattattaccatcaattttaaacaaaccaaacagtgatggatccgatcggagcatgatccttattaattacatggtagtggtcgtaaaagatcttcgagccccacaacaaatctaccttgataactttgaatctagctagctacaaccggcttatagctagattgaaggagatgtgtccatcctttccaaagaaaaaaaaaagagaaggagatgtccatcctatatatccgtcccaagaatcaaatgcgaaataaagggttggaaaaaaggttaaacaaggttaccaccgtcgtcgtcagccgcgcgtgtgtatgcatttcagtggccggcatggatttaattgtttaagagctcactcacactgccgctttagagagagaaacgacgtactatagctagctagatagatagatcatattatttacagaaataaataatcgttcgtgctgttgatctgtcgtacgttcagagatctgttagtgtcaaactaaaactaaacatgaggttactgtcgtcgtcaagactcgtggcacacagcagttcaagtcaaaaagatccacagggcagcagggtccagaggtctggtcagcatttcaatagaaaccacctctctctctctctctagcgcgcgctctctctctcttccagacttccatataagcacaccactactactctccccggcctcagctcgcattgcaccttacgtctaagcttactactacgaggaacgcccttacagccagcttattacaaaggcacacagcgcgcgccaacctctcacgatcgacacgccgccagcatggtggtgccttccacgacgccggtggtggtgcgccaagaaacgccgccgccgccgctgccgctgccgccgtcccacgacggcataataggcataccgacggtggacatgtcggcgccgggcggccgcggcgcgctgtcgcggcaggtggcgcgcgcgtgcgccgaacacggcttcttccgcgnnnnnnnnnnnnnnnnnnnnnnnnnnnnnnnnnnnnnnnnnnnnnnnnnnnnnnnnnnnnnnnnnnnnnnnnnnnnnnnnnnnnnnnnnnnnnnnnnnnntcgcacgacaagcatgcgcgccggcccgcccagcccgctcggctacggctgccgcaccatcggcttcaacggcgacgccggcgagctcgagtacctgctgctccacgccaaccccgccgccgtcgcgcacagggccaggtccatcgacactgacgacccctcgcgcttcaggtatatacaccacactacaacacttacttcttaccacttacactatgcaagtatgcatgcatgacgcatgtacatctttcattgtgatccatgctagctatagagtgggaaaggaaatccttctaacaaagctccaacacgaatctcgaagctaactcattttaattaggcacaaatgtatctgatttagagctaattttattgcattatcgtcatcaatgttttacactcaaagtatataaatatatgtataaaccttcaaaaaaaagtttatgtatacacagcatacgtgtcgcactctgggtcatggtgatttattatgctaatagcaggccttgaggttttaaaagcttaagctgtcaaagagagacatacgccaaaggaacgagaacaggtgttgtgaggtgtgtgttaatgttgatggctacctggagtgtcatgctcctctgcactgtgcctgcagtgctccttaattaaccaacagcctatatatgctactgacagtgcgtgtgtgatagatgtgtggtttgcatatcatagtcctacacctgtcggaatgtctcgcttgatgctaagctctcagcagcagctagcaaatgatgagtacatatatatagtagtgagagtaggtttgtttttgtaaggtttttctctatcttttgtgtgtggaaggtgatgcaagcatttgatatagattaacctttgttgcatgcatattatagttaaggacttaaggtcaacatgcatgatgtgtacatgcatgcatgtttggtatagttttgttaattcctgctcattaatttacaatattggtactttggtcgtttagaagtcaagaccacttggggtatggtgtcatatgcatgtatgcactcctctagagcttccaactagggatgcttgtagccaacttctgatggagtacacacatccacataatgttaagaaaagatggcaaaaaaaatgtttattttggacagtgttccttgaatttttggagtatatatagatttaattaagcccagcaagaagcatgaagtgttagacttcctgagaaagcatcctttgataattgatagtgccaacttttttcgacggaaaagagaataatagttcaacagcaatgtgggcattcgaaatccaaacatctatatattaatctgaatattacactataaagggatagacaagaaagatagttcattcaagattcttactcatgatttttagctttactgattttttttccagttatatgcttttatccttgattatgatagctttagggggatgttcctgtatgttgtcgtagtcagaaaggcccccatcaaataaattgtgcaaatgcataactacatagttttcaaaacaataattatcgcaataatggcgcgcaattgatgccacaataggcagagcaatgatatgttagttccaacaattcaagagcatacatagtagcagtagtagtagtagcagcagctagtttctaaagcaaaagaaaaggcacaaactgatgggacataacaaactcgacagctccacagaatgggcttgggcgattttctgatgaaaggtaggtataattgccttgccaaaagaacattccaaaggcttacaatcgactgcttttcattttgcactgtaaaatggcttgtacattttgcttgtgagagggacagcccttgcccatgctgagaaaacatttaaatgcctaacaattgactgaacataacagatgagatatctttagctatttctgtgcattgggaaggggagagatctcatccaaacaacaatgctagcctgctaggagagacctcacacactacacaggcccaggcagtggcctaattcaatagagttggttgagagcaaataaaatgaaagggacaagaaaaccctcctccctctaaggtagttagaagacccctctcagtgtcaggtccctctccaacaaactatgtgtatttgcatgtcaatcagtatcacatatctgcggcgcagtggtcttcaattaatggacatacccaaccaccaattgatgcagctagcaacagaacccatggctattggatacctcttacagctttttcagtgaagtacactaagttccatacagaaaatgatgtttttagatggtcacaggatacacatcatatatgaactttgaaatgaattccctttgttctctatcaactagacatgaatcattaatatatggccaatgtccaatattcataatgtagcagctattaagaagtagaagagccttgatcacataaaaaatctaagcttacagacacagcagttgggaaacatacaactgtaaaaatgctacggagtattgcataaattccatatggattcgctacccccaactaatctaagaatgctagcaacaagaataaaaatggaaatggcatcagaatctttgcagtagccattttgccatagaacacgagtataggtaatagcaagtagggtccactgaagtacaaaagcttgataagaaataaaatgctccccagggccccctaaagagcatatccatgctatccatataaagccaagcaaaggaaaggaggcacacatgcaacgggtcctctttatggcaagatgaatgagatgtcccaggaggggtgtagtggcaggggcagtgatgagtgataccaagcactgatgggtctatccatggagcagtcgaaaaagcatgcccaatcctgtcgaaaaaacccatttgcccattggaaaattggtcacaccaaagtttcatgtacggctgatccagagctatccatgcttttttttttttgaaagatggagctatccatacatcacaagaaccgaatatgtatagcatgtgactggattctggttctgctcccagatgcatccatagcatcaagctaccgtcttttcaaggctgcagcttttgagttgctgcatattcatacatcaatcagtcaaaatcttctcatctttcttcagtctcctttttctctcatggcacacatccaattggtcttcgtgataactccattatattgatcaaatcgatcctgggcagattttaactcacatgttgatgctttttcttcactgttgttgcagtaatgtggtgaacgagtatgtgggagcaatgaggcagcttgcatgtgagatcctggacctgttaggagaggggctagggctcaaggaccccagatccttcagcaagctcatcactgacacagacagcgactcactcctgaggatcaaccactaccctccagcatgcaccattcagaagcttgaccatgacaaccaatgcaagatgaagagcagtttcagaatcaagactggcaatggtgtgaaccagtcagcaggtgcacggatcggattcggggagcattcagacccgcagattcttagcttgctccgatcaaacgatgttgacggccttcaggtgcttctgaactgcgacggcagggaggtgtgggttcaggtgccatccgatccatcagcattctttgtcaatgttggtgatctcctccaggtaaaggcatcagtttacctgaaaataaacagcactagtagataaagtaaatgaaaattgcttctatgagctacttagaaattaaattagcagactcttaagtctaaaacaagcacagaggctaggcacaactcagcacccccaccattagtactcacatatgaaattgcattatgcaactcccgtctcagtgcatcatagaaatagattcttcacttactaaaaacatgaaaaagaaatgtatctctatttgattcgaactctaaatagacaccaggttagctattgctccttttgtgaaaagatgggtcggcactgatatttttggacacatctcttggactgcatcaagtacatcataccaactgacaagaatttctgtttttgtcttgttagttgttactacatctgaatctaacaataaccagatatcaatccatagtgcaacaatacaatattatgtctctcatacttggtttgtattcatctctcctttccctttcttgttcccaggctttgacaaatgggaaggtgataagtgtccggcacagggtaattgcaaactcctgcagggcaaggctgtccacaatctacttcgctgcgccgccactgcatgcacgaattttggccctcccagagacaatcacagccaactcaccccgccagtaccggcccttcacctgggccgagtacaagaagacaatgtactccctccgcctgagccacagccgcctcaacctcttccacatcgaccatgatgaccacagcaatgtcggcaaaggagaacaagaatagggagcacttgctgaactgcaggcagagttaatggtggggactaggtaggtagaattgtccccaaaattttggctctctggcttccacagctagatatctagtattatgatggtgtagggttgtgagtctgccaatgtgtaatagtatttagcattgtacagaagtccttgttgtatggtactgatgtactattgcctgttttagcagtttgttgtctccacctaacttttatttactctctcccccttttctagtgttgcctttgcttaaagaaacctcttccttgcacaaaagtgagacctaactcagactcctgctgaaaattttgatacagtatccttttttaagaaatctaaaattaaaggctagaaggagttcaaatgtcacatatactataagcataagttagttcaaggaagtgatagaatgttccagtaattaattctgcaaatccattccatcacaaactattccccactctttatcaccttcgcagtgca

SEQ ID NO: 4914 - DNA, 3327 bp, Sorghum bicolor
ctgttatttccagttaccattttccaaagaaacctgatctcactagttgattaattgcatatgtcttctttatgtatttatcccaatgcttttctttgttctattatatttgtcttctttatgtatttatcccaatgcttttctttgttctattatattttaatttttgtttatgcttttttatttttacattatgacttttgctatgctgcctacagagtaagctcgagtttttactgaggcttcaagaatttgtggaatttgtcaaggctaagaattgcattcaggctatagcatatgctcgaaaacaccttgctccctggggcaatatgcacatgaaagaattgcagcgtgttacagcaacattggtttttagaagcaatactaattgtactccatacaaggttagcagcattttcactgttctcagttatgatatgccaccgtgtcacgaattgggcaacagtagaaaaaccctgcttctgtatggcatctttggtttgtagctgacagccaattcgagctgagacaggaaagtctttttgtgaatatgaccctgtaatcaaagtagattttgtttcctggcttgagcatggattttgaaacatactgcactacaaatgttttgcatacttgatactgttttttacttgtagatattgtttgagcaagagcgctgggactatcttgttgacattttcaagcaagacttttgcaagttgtatggcatgaccctagagccgttgctgaacatatacctgcaagcaggcctgacagctctgaagaccccgtatccctcacatgattatcccttactttctctacagtctttcatcgctaaaatatagattgctaatattgtcgtggttatggtatcatgtattgtccttgaccatctaaagattctgcactgagggtagctgccctagggaagaccccttgtccctggagggcttcaggaaactagccgagcctctgcccttctctaagcaacaccactcgaagctcgtctgttacatcaccaaggagctcatggacactgagaacccacctcgggttctgccgaacggctatgtctacagtgagaaggtacaccctcaactgagctgttctttgtaaagcgccagttcagttcaaaccaacttggcttagcgcttgctctatattttgcccacaggcgcttcaagagatgtccaagaaaaatgacgggaagattacatgccccaggacaggagatgtttgcgacttctcagagtgtgtcagggctttcatctcctaatcatgaaatacactctgatttgtgtggcttgggagtctggagtgaatgtacatagagtggtcagcgcattgtgcgtcatgttaagttaattgaattaacctgcaatgttaaactggctggatgttggaagtatctcatctgcctctcgattgttgcatctgtgttctgtgagactgacgtttttcatgttccaagtttccacgccttccaaagttcatcaactgtataaccaggaggcttcagatcccatccatgtaaagttcagttttgcaaagcgaagttatgaaaaggatcaccagagtttaaaaaatgatttgtctcacatttaaacctcagcacgatactgcactgagcaagatgccaaactgatttcattctgaattcatgatgtttgccttgggcaacctgtgcaattgcaaatttgcaatgcaggctcgtctcccactgctttatttatttttttttgaaaaaaagtcctctatttttttttgagagggaaaaaaaagtcctctatttagagcagcgaagacggtaatgctcaggcactttccagcccattcattcatttacgtatgggccgcacgagatgaagcaaatcggcccagcccatcgaacactgactccagcaagatccagccgtcagatcctcaaacccctaaatccaacagcccacatcgtccgcctcctctatataggcgaactcagccgcgaacacaggaaccctagactccaccccccaccccgccgcacccaaaccctacccagccgccgccgtcgccgccgccgcagcgcggaggcgaccccccaaccgccgccaagatgcagatcttcgtgaagaccctgacggggaagaccatcacgttggaggtggagtcctcggacaccatcgacaacgtgaaggccaagatccaggacaaggagggcatcccgccggaccagcagcgtctcatcttcgccggcaagcagctcgaggacggccgcaccctcgccgactacaacatccagaaggagtccaccctccacctggtcctccgcctccgcggtggcgccaagaagcgcaagaagaagacgtacaccaagcccaagaagatcaagcacaagcacaagaaggtgaagctcgccgtgctccagttctacaaggtggacgacgccaccggcaaggtcacccgcctccgcaaggagtgccccaacaccgagtgcggcgccggcgtctttatggccaaccacttcgaccgccactactgcggcaagtgcggcctcacctatgtctacaaccagaaggcgtaatcgcttgcgccgatttgctttacccgcctacctatcaagcatccacctgttggttactcgaattgaatctcatttagatctgtctgaggttgaaacttaaatggagcagtagtatctatcatattggtaccccctgttactgagttgatgtgatgctgagttaaattttgttttcatattcttctatcattcttgacgattgcaccttttggccgtttcaccattattcataggtcgattatatttgtattgcattactggattaattgcttagtattgcataattggattaaatgcgttccttagctttcgatttattttggttagccttgagattgcagctggcaagggaaaatgccctggctttgtagtatgtttgtttgtaggaatgtctccagatagccagtatttaaccataattctgctcagtgaatagttgccatcactaaaaggaattttgccattttgattgcagaattgcttgttcttgctctagttaggtagaattgcttgctctggctgtagtatggttatcatatcatgcaaatctgattgcagtaccatcaaattttgtcgctgtaagcgctgcagtcatggattgcatttctcagcttctattgctgggttgtttcttgattattattatgactaagtaatctatgaatatcagtattgcatgcctgcccttaagtcattcggggtctgtccttgattcttattggacataaattattggtactataattgatttatcttatgac

SEQ ID NO: 4915 - DNA, 5599 bp, Sorghum bicolor
ataagatgacgcccctggcccaccaaggagatgagagcggagagccaaatgggtcgccaccccaccgagaagccagagagagttgccatggtgacctaagccaacacagggagttgcaacaaaggcacgaccatcgcccaataaaggatgacgggccgcactagccaccagtcggctaagagatgcactatgcgaagcctgccgtacaggatcgctatcaccggatcaagtcgaaggtgggcagcaagtagatatgcccaacaacaagggagaaagaagatggcgggaaggatagggccagggaaaagggaggtaaaagccccaaccgctcaactacaacacccacaccctagccgcacctgatcgccttgcacgtggttcccgcctccaacaatgcagatctagctgcccccacgcggatctagcttgtgttgacacgcgacaaaaagaccgcaccactatgagggtaatgaagtccctacggacgcggttgaaccgtagcgggcaatatgcggagcagctcgcacaccatggccccgcatgcagttgtgaacttgagcccggtgttcatgccaccactgacatccatggtgcgtcgtgaccggggttgagagtggcaggatggccccgccaccatcctccttattgctcgtcgagcactcgatcgacagctccactagtgatgagggcgaggtcggtgctatgggagggagtagggataagaccctattcgctaatttgaaaagttatggctgaaaaatagttcgctgatttattgtgagagaaaaacactattggttggcaaaaaaatacgacttataacacaagcgaacaggatcctactaatgttaagcatttttttttaaaaacagaaacctctaggatcacataaatattctaggagtaataagaaacaaactccccataaaaacaaataataaaaaattggatgaaagaaatgacaatctatccatgtgccggcccatgtcagtcgcggctcgcgggcccttcaaagtttgggccataaaccccctgggacgcggtcggctctgcttcactctcctctcttcgcctcgccgtcgccgcggccgcctcctcatcgccgactagggttcccgcgacaccgccgctcgcatcctcgggaggtgcgtgctcttcaccgtctcggacctctcgttcgtgtacaccgcctagcattcgcggggagttgccgagtggggctcgtctcgcttttccagttggcgctttgttctccgtggcttaattttccgcggattcgtcgttggttggttggtaaatttttttttgttacctttcaagaccgtgttaggatggagggaaatttgtctctggtaagggcctaactatgacaggggatcatgcaaaattagggttttgattgcatcatttgttggttttgccgcttgtcttagggtcttgtacgtgaatttggtggatgtttgaatgtatgatcattgttccactagttttggcacgggcttgcggcacgtgtagtctttgctgtttcttgaatcatctgaaatgagagttgattagtttctgtgctgtacgttttatttgtgtctgatcattcaaagttcgtcttttggattgatttgttgtggtctttatgctgcattctcttttcctgttttttttcctttgccaagagcattctgggattgatgcaaatttgttcctagcagggatactaattgtgaaagggggcctttcaaatttatagaagtataatcatgtgtgttgtgtatggatcttccacggtaggagcatgattaggggaaactagtccaatattgaggtctattgtatcaatcaggtccatgcaagtttatttgcatgtttcggtgacaaaagatgatctctgtgtaggtattgcaacctgacattttattgtcttgcagtgcataatgcctcgatacgatgatcgatatgattacaacgatcgatatgatcgccatggtcgatatggaagtaacaccaagttgtacgtgggccaaatttctccacatacccggacacaggatcatgaggaccttttcagcaaatatgggaggtgagtaaagtagttctgagctttgcctttttgtatttgtagctttagttgctcctgaatgtcattcaactgcttggttttgtctgtcttttggaaatccatcattatatgcaaatgatctgcaccagttggaactgattctgaaagcgagtcacattattataataaaccctaccagatttattaaatatatgacatttaggataagctgcttttgaactaattattagtttgtcctaaacatcatatatttaagaaaagagggactgatatatgtactctcaagcttcaagcaattggctcaggctatttgttctgtgacttgcaatttgtatattagctaagactacagcttttggttcttcatcattggtgtatacaaaattataaactgctacttttttatttactatagctaatagtgtaacattttaactttatgcctattcatgtgcgctatttagctcactaatagaaaataaaaaggatgtttcctgtagctacatatatgtcccttctggtctactggatattttcctcttaaaaaaaggaccagcctaggaggaattgtggctttatattaagaaggaaaaaataggcacccaagttcacctcgacgaagactcttcttcctaatagaactctagtgactgtgggctgtggctgatgcctgttatgcctagcaaataggttttaactgtttattatgaattgtggcatgaatgcacatcatcgtgtaaagtgtataaacagagctgattctgctttgtttgtctttgctaataattggagaataaaagtttatggttttggtattactttcctggatgattctgctgatacgtggtgttactaggtgctccgtttttttttaattaatgctgctgcattgctatgctgtctgatcaattttggttctgcttggccttttgtttccctttttccattgtcaaatttccatcacatacaataatctcttatgagttttaattaataatctagttgaaggtttgtgggctgtcaccctacttcagtgtccgtggtgagagtgtgccattggtggaattggtgttgctggttcacattttaggcagattttggcaatatttttaaagtttctgccatctattttttatgaaaagaacacttggcaaagtagtgtttagtttgacaattggctgttgttacattttcattaattttcattacttgaatcatgatgtgttactgtttctgccaactattctcccagattgcgtaatgtggatctgaagagggactttggctttgttgtaagtaaaattagctactcccctgctgcttcctttaaaaaaaaagaattcgtcactccctaaatttgcaagatgtcctgtaacctttctgattaataatcagtacttaattatgtttttcacatttaagtccacccctgtgtcttggtttgctggatcttactgcaggagttcagtgatcctcgggatgcagatgatgcaaggcatgaccttgatggccgaagatttgatgggagttacatcattgttgaatttgctagaggggtaagctgctactgtttatcactgttctcttactacaaagtgaatgttttactaaattctatgcctttgttttgtgttttggagctaaactagagccgcggccttgtttacttgcaaaatattttgcaaaatgtgaatagtaccaatttcgtttgtatttgacaaatattgtccaatcattgactaactaggctcaaaagattcatctcgtcaattccgaccaaactgtgtaattagtttttattttcgtctatatttaatacttcatgcatacgtctaaagatttgatgtgacgagtaatctgaaaaattttgcaaatttttttggaactaaacaaggatatcttccctagtctaagtaacatgtttgttttgatttccctaggcccgacggggtccaggaggtgttcctctagatgtcagaggaccaccttttcctggacgctgctataactgtggaatggatgggtgggttcgtgattgcaaagctgatgactggagagataggtgctttcggtgtggagaactgggccatatagaaagaaactgcaagaacagtcctaaggatctgaagtatttcctggaattccctagctaccatgcattttcccttctctttaagtatctacacgttttcactgtaaggttcaccaatacaggcgcgggaggagctactcgaggtctccatctcctcaccatgggaagggccgagggagaagctactcgaagtctctatctcctcaccatggaaggggccgagggagaagctactcaaggtctccatctcattgtcgtgggaggggcagaagttggagttacaggtactgcattaaaccttggttggttatcgtgcgattatatgctgcaattgtgtaatgcatagttgcttggtgcttgttatggatgcaattgaagtgtagaatataatgttgctgtgaggcctgccaagagggaaattgcagttgttgtgttccacttgtgctatatgtcgatgtgttgggaaatatacatcgatttgaccaaccttctcaattttctaatgggtatctaatgctcttccaaacacacctttaagtaacgctgaagttaacggattatagtattatacttgttgcctgttaaacacagttgcattatatgtaaacaaaagtttccaaataaaaacctgtcctgcaagttaaaaagggctgctgaattactttatacaatgcaaagtataggaaaagatgtttcctagaattccgttctgatgatgtttgattttgactaaatatttctaactttattttttttcccactaacagtcggtcgctttcgccaaggaacaaatttaaggctgatggtgaagaattgccaccaagaacctctggttacagccgcagccccaggaggagctccccaccaagggagcaaggttcataccatggtggtagccccatgagaggtgaagctcaggggaagtgtcagtgacctggaaatttaagactatggggttgtgaattctcaaacatttcttctgaactttttcggtgactatgtgctgaggcatgaacttgataccggaagaatgttcagagcggtgtgtgtaccttcctttgaagctggggttatgaattctcagtgaagcttcctgaatgttgttggttatatgccgagacaatgatacctgatgtctgaaggagcttagcgggttggtgtctgtgtgtagaatcttgctagcacttgattaggtttctgtaacctttgatgatggttccacactaaactaatttccatgcaatcgatgacatgcactcaactaattcctctattcaatcgtatgcatttcttgagaccctgtttagttgcaaccaaaatcaaaaaacttttcaagatttccatcacattgaatattataacacatgcatggaacattaaatatatagataaaaacaataagtaattgtacagtttacttgtgatttgcgaga

SEQ ID NO: 4916 - DNA, 6213 bp, Sorghum bicolor; identical to SEQ ID NO: 3955

SEQ ID NO: 4917 - DNA, 5450 bp, Sorghum bicolor
  misc_feature (1496)..(1595): n is a, c, g, or t
gtgcaacaagaaatgcaagatagatgggacacatacagaggcagcggaagaaagaagaaagtaatatcagacttctaactttaatagtagttgagatagagtaataagcaaacaaaatacaaacatgtgacattatttgtcgttctgaaaagatgttctaaccatatttagaatgtgacaaaaggatatgccgtgtttctagtttcctaaattcgaaagcgacaagagggtatctatatcatccgtatcgatcgttactatataaacgttacaaaaagagctatgcatcgataacggcaaacaaaagcataattttgttttatatgaaactaaaaagcaagaaaccctaggacaggtaggtatgcatggataacagcaaacaaaagcataattagggcacctctagcctagtgtcaaagctaggcgatgtaagtgttgtttgccaacctaaaagagagaagaagaaaaaaatgataaaattttagtgagaatggtcctctcaaaaggtagccagcaggcacctatcgcagattgatgacatgtgtccatacaaaatcctccaactcgatctaactctcaacttgaaaacatttaagggttcatttaccgttacacacctacagcctagttagggatggcaacgggtagcaagaacccaataccctcgagggagctctgtcatagtttctgcacgtgttagcaaggtttttttttaaaaaaaaaatttcgggtgtagacaacccatgggtaacctatatccgcacttgcacggtatatataaccacaaaaactgtaccaacagtacatggtacgtgttttttcgtgtgtaaaaaaaaaaaatctactgaaatatgtgtatgagcgtgaatacccctcgtgtataaaccgttaccactacagctaatttggtgacagcgcgatgctgctaactatatatcacatcatttttttttctgtctactaatagctgttagcaaaattattattttttattaagtgtgtcacagcttgattatttgtagttaataattaatctacgcaaacaagtcccacgcatgcatccatgcatggtgtgttgaactgtgtgaacacgagattattccattcccaccacccctgcgacgctagtctctgcccgcccgccgcccttgattcacggtggccgtcgcccgccacctgcagcctcgctcgtccacgccaccgtcgcccggccgccttccccacccacccagcctgctggctgcgtcgtcccgcgcgccgcccggccaggccagcaccgatccaatccacgtaaccaaaccaaccaccgcgccgcgcccaggtacctcggccggcgacgcggtcgatcagttgcacatctccccttccttttagggccgccgatcgaacaaccctctcatttcaatcacaccgcactcacacacacacacacacacgcatgcatccatatccataaaccctcacgcgcgccgccctcccgcacgcattcttccttnnnnnnnnnnnnnnnnnnnnnnnnnnnnnnnnnnnnnnnnnnnnnnnnnnnnnnnnnnnnnnnnnnnnnnnnnnnnnnnnnnnnnnnnnnnnnnnnnnnntcccccccccccccccccccccacagtgcccgcgatccagtccacgtcctcccgcgccgctcgatcgacgccggcgaccgacctctaacaacccggccgccagagcggttacgcggatcaatcgccgtgccacgccgaaaggtgagagctgacgtgaacgggcgctagctagacgacgacgacgacgacaccggccggcgcggctggcgtggcaaggcgccgtgcggggctcgccgacgtccgctataaaaccggcaggtccccctgcggagggggatacacacccacagagagagagagagatcgcattcattgtctttttttgtttccgtcgctgcagtagtacgtgcgctcagagaggaggaggaggaggaggaggaggaggatcggatcaggaggaaggagatggcgacctgcagggagagcggcgggttggtggcggtgcggtgcgccggaaggatcggggtggtggcctcggtggccatgaacctcgcgtggatcgccatgtacatccgccgccgctacttcggcgccggcggcggcggatctgacaacaacggccgcggcgtcaccacggtggagccgtccaaagggaaaccgccggtcactgaggactcaattgttaacctggaccagtgagtgatcccatccatattacaagatctttgttaccttctgcttctgtttctatttattgcccgtccatcgatcgctagtgcccgggcgtccggcgccgcagttcgcacggacgaacagcgttgttgttgttgttgttcttgttgtttttagggcttagcgttcctttctgaataaacgattcggatgaggaagagatagtcatatatgggcttattagcgaactgttgttatcatgggctgatcgtttgggtggagagcctgttcgcttgtcgtactttttccataatgaatcaatgaacagtattttcagccataactttttacaccagtgaacggatttgtgccccgcgatgcgcaaatcgctccgttccgatttggggagccagccccagccccccagccatatgctgtttcactgtgaagtgaggcagctagagtgtggaacacatatacatcgtccgtgaaaggcacctctggccctctccatctggcaaggacatgtgtacctggttgtctgattaattgttgatcatcagtactatttgtttattttgcctgattattaattgttcatcagtagtatttgtttattttgcctgattatttgttgattagttttctaggggattaattgttgagtacctcccttcgttccaaactataagttattttggcttactatgtatctagacgtaacatacatccagatggatagcaaaaactatgtatatacttagaaaaagtcaaaacgacttgcaatttggaatggagggagtagtatttacttattttgccaagtttaattgctgatagtagtatttatttattttgtcttttcatctgctgtttgttctatttgtttaattggatggttgaatttaggaaatagttaacagagtgaaagcagagatggattgagaaagaaatggtaaagatggtgcctgtaaaccaaaaagtacatactgtttcacaaaaaacagtacaaattgcaattaccaaccttatatatatatatatagcatattgtatataatttctttaatctgaatcctagctactttgttgtctctgttctctatatgctaagaacttcgctgtgccttaattaattcgatttcctccaaggccatgtaaaaaatccatgcatggtttactcgcgaatccatctccatgcatcgtccatgcatgccacgctgcacacacatgtttttaacttgtttctgttcgttgttgcagtggtgacccgactatgtatgaggagttctggcgtgggacaggagatagcgcctccattttcatccctggttggcaaacaatgagctacttctccgacctcggcggcatttgttggttcgtcgagcccggcttcgagcgcgaggtccggcgtctccaccggctcgtcggaaatgccatggtcgacgggtaccatgtgctcgtcgggacaggctccacgcagctctttcaggccgtgctgtacgcactctcacctgcaagcgacggcacgcccatgaacgtcgtctcaccggcaccatactactcggtaagaatagatcaagaattattcatatacatcaatgttgaaaatgtggtttgttggtttattcaaggaaattgcattatctcatctcatgaaaaaggcacctacttcaatttctacaacacattgttatgacataatcttgctgattttgaatatgtgcagtcatacccatctgtgaccaactttctgaactctgggctttaccgttggggtggtgatgccaatacatttgatggtgacacctgtattgagctcgtctgctcgccaaacaaccctgatggtagcatcagaaaagctgtcatcaaatccaagtctagcaaggctgtttatgacttcgcctactactggccacagtacgcacccatcaccgaggcagctggacatgatatcatgttattcactgtatccaaatgcaccggccatgccggcactagactggggtaaccatttcttgatcaattgtcaattttatgttcaaaattttctacatcaataatggtatatatgacattatttctgtattaacctaatttaagagatataaactacggtttgctgcatggatggttgtaggtgggcattggtgaaggatactgaggtggcccagaaaatgattaagtttatagagctcaacacaattggcgtatccaaggactcccaacttcgtgccgctaagattattggggcaatctgtaacggctatgagctatcatctgctggtaaaacaagccacctcttccattttgctaaggaaaaaatggcggaacgttggattagactccgtgcagctgtggcagcctcagacatttttactctcccaaatgagctatcaggctattgtagtttttccaaggaggcagtcaccgccaatcctcgtaagaaatcacactttctaatttttcattctcatatctattagtagaattattgttttttatacttttgtctaacattagggagtattttttttattttatttttccttggttagcatttgcatggcttcgctgcaagaaggatgatattgaagatttggagggctttctgcgtgggaaaaagataatcactcgaggtggcacaaagtttggagtggatgggagggttgtcagggttagtatggttgacacagaccaagccttcaatgtgttcatcaatcgtctcgccacaatgaagtgaaatttgagtgcaaataaagcactttgtggctacaaggatgatagtgttctaagtttgattagatggaaggatgtggatgctttggaaaacttaataatgttttatttgttctataattccgtgttttctagtattgtataatattcagtgtcgaatgctatatgtaattgaggttgtgtggtccatttcgttatcatggccaattatttatggatggcaatcatataatactgagttcataataatgttatagtttgatagccctaagtttttatatgtttatattttagatttcttaattgtatagttctacgatagttgtacttcacaaagtttggagaacgttccgatgctaggtattatgttgtttatttaacaacaaaagggatacctattatttgaaattggataaattattagtcccattgcgaatttatgggttagtaccattcctaatttatacaaagctacttggtttatagtatttaaggggtactaaa

SEQ ID NO: 4918 - DNA, 6347 bp, Sorghum bicolor
tcagtatttcactctggattatatctacacttcgtattcttattggcccactcacctaccacggtaccacctgaaaaaaaaatattgtgttctttcctattttacggggctacgtcgctcgatagtcgagtccctccatataacatcatcatcaccatcgctcaagatcccagcaaagatatacagttaggccttatttactttccttgcgaattttttttaagttactatagcactttcatttatatatgatagttattattcaattatagactaaattagcttaaaacattcgtttcatagattacagacaaattgtgtaattatttatttttttatctatatttacatgatttagagcatctccaagagattagctaaatcattttctaaagataaatttagctactattgaaggaaaaatatttctagcagactctataaatgactcttcaaatttagtagctatccacccacattattcgctctctattttttgatagcttacctcattagccatcctttacagaatctgttggagtattctaatatttttttttgtcaaatctattttaaagaatagctaaatcagtaaatttgactaatatttttggctagtctcttagagatgctattaagattcaatttaacagataatcttaaaaacaattggctagaggaactaaaacaaggcctttcatataaaaataccagcccctcttctgagtttaaaactaaaagcatttttctttacagtagcattgctgttcttgactttttggccttggccttgtttagttccgaaaagtgaaaagttttcggtactgtagcactttcgtttgtttatgataaatattatccaattatggattaactaggatcaaaacattcgtcttgtgatttacagctaaactgtgtaattagtttttgttttcgtctatatttaatatttcatgcatataccgcaagattcgccgtcacatcgaatcttgcggcatatgcatgaagcattaaatatagacgaaaataaaaaataattacacagtttgtctgtaaatcacgagacgaatcttttgatcctaattagttcatgattggacaatatttgtcaaataaaaacgaaagtgctacagtagcgaaatccgaaatttttttgaaactaaacaaggccttggtttctagggtgaactaaacaaggcccttgtttagttcctaaaaattttgcaaaatttttcagatttctcgtcacatcgaatctttagacgtatgtatagagtattaaatatagacaaaaataaaaaataattacacagtttgataggaattgacgagatgaatcttttgagcctagttagcccacgattggacaatatttgtcaaatacaaacgaaagtgctacagtgtcgatttctcgaaaaattttgaaactaaacaagagcagtatggagcacagaatagtactacccctagtacactagtcactgctcaagaaaaaaaaagcaacaaaagtgcgtcgtggtggtgctgccggttttgactgcctacctgacccgccactcccgcattccttctcctctcaggcggtggtggcggcggcggcggcagccaagaaacgcaaggcgaggtaaaccaggaggaagaggagtggtggattcccaatctttatatagagggtaataatccccgacccaagtttctttaattcctttccctttcctctggttgcagattgattctttaccaactgtatcgccattcattcctgctcattgggcgtggggttccaacctagaaatcggtccttttccgcgctactagtgggcagtggattcggatgggagccgctgaaaaatagcacctttttctgccccaagatgcctgtttccgcttcttttccacgccacaccttttgaatccattgccgtcacctccacttttgcagcactagttgtttctccgcctgtgctttggagtttggagggggcagagaacactatcctgtcgattcaggaaaacaggccgagcctaatgggcaggaagagcggcggcggcggcggtggcgcgcgattgcaatgcgccgaggccaaaccggcggcggattggagctgctgcttcctggccctgccaccggcagcggcagcggcagcaccgtcctgtgcggatggcgatggtggtttcaacctctcctggaacctccaccagtccttccacccgccggccggcctcttcgccagcatgggccagcaggttggggttggcttcccgggggcttcgtctaggtccccgtcgccggagacaccacgggacccgtacatgaagtacgtctcgccgccggaggttgttgagacacctctgccgggggaaggtgtggtggggttgaaggacaaggggcagaagaagaaagtcgtgaagctcaagattaaggttgggaatcatcacctcaagaggctcatcagtggggcaatcgcaggcactgtgtcaagaactgctgttgcacctttggagacgatcaggacgcatctgatggttgggagtaatgggaattcgacaacggaggtgttccagtctatcatgaagcatgagggatggactggcttgttccgtggtaactttgttaatgtcatccgggtagccccaagcaaggcaatcgaggtaaacggctgatccatggtcacaaaattcctcatctgttattttttactgtgctttctttgcaatgtatttacagtaggcacaattattcatcaccataatttggaaatcaaacccttggctacatatttgtttttgagaatatatactaccaccttgcaaataaactgaacctttcgttggtggttatatctagtgttaatttgttgcaatatttcctcatcggcagtgctacgaaatgctttgagttttctatccttggggcacatatctatagaacaatatgctcaagttggtcatccaaagcacaacgaacttgcttgcttttgccaatgtttggatcttaagccccatccacaggagaagctcacactgagagttctatctcttttttttataataaaaaagagtgtcctctgttttaagaaagtagtaataagtttgttacatcatccatgctggggtgccatcttacaagcaaaagcacaaaaaagtccaacaaagcgccatgctgctattgcaataattcaaatttcatctgaaatgcttctaagcactggggagtagttgctaagccagcttacaacacggatcagtgagcggattgcttggctagaagaggatggccaaaccaacgttgttgtcctctttgtcatagcacggatgaatcagctgttcatttgcttgcacatttcaatacagccaacgagtttggtctgcagtaagcacttggaccgaggatcagttccctgactcttcaggctgggcttcctttgaatctgtgtccatttggtggcatgcagttggaaaggctgggcatgcctattaaagccatctgggcattgacaatcctggtggcttgggagctctggaaggaacgcaatgctaggatttttcaacgatgccattccgcttcggaaagcctagttgtgaaaatcgaggaagtgaggacctggtgccttgcaggagccaagaggctcaaggagattttacctcgagagagtcctctagcggagctcttggactttttgttttttcctcatttttgaaacttctattttgtgtttaaacttactcttcttctctattaatatatgccaggcagaactcctgccagccgtttcaaaaaaaaaaaggcagctcacaacacttacagttttctcataacctcgacctatcaagaaaagtctatctttttgttattggcttatcttagtggaactcttacagttaagtacttgtaaccagagttaatgcagatatttttttccttgtttctccgcagctaggtcatataggttattgggctaatcttgcaccatagagatcaatcactataggatattgctgagtgtctgcgtgatctggtaaattactggcttcatagagctgttgaatgcacaaattcaaggaatttgaacacttaaataattactgtttctttgctcaagatagaagagctagcttcttgtaaccctattagtctttcgggaaatttaaaactcagaattacttgttggaagaaattaaggtttggaccttcaatcttgagttggcaatgatctgtacctttatcccttattggatattagaagattgtaagattggatggattgctggcttagtattgaactgcaaatcagcagtacacaattccaagactctctcagcagtattggacgggcttatgccgcattttttctagttacatttagtacctgcacatcttggataggcttaatggctccatgcatagatatcattagatgcattgtgattctagtaataatttagtcacgtaaatggcgatatattaatgatgcttatggcatggacatgtatatttaaacagcaccaaatatctgaggccttgtttagttccctataaattgtgtagaatttttcagattttccgtcacatcgaatcttgcggcacatgcatggagcattaaatatagattaaaacaatacctaattgcacagtttacctgtaatttgtgagacggatcttttgagcctagttaatccatgattggacaatatttgtcaaatacaaacgaaaatgctacagtgtccgttttgcaaaattttttgcaactaaacaaggcctgattgattgttttgacttcttttttgcagctttttgcctttgatacagctaataaattcttgacccccaaatctggggaggagcggaagatcccagtccctccttcactagtggctggagcatttgcaggtgttagctcaacactgtgtacataccctctggaattgattaagacacggttaactatacaggttagtgctaaccacaaggcatataccttccctaaatctaatggaacgagtggaccttcatactaaagtgcgaaacatgagaggctgtaatggttgctctctaattctgcagagaggtgtgtatgacaacttccttgacgcatttgtcaaaatcgtccgtgatgaagggcctactgaactctaccgaggcttaaccccaagtctgattggagtggtgccatatgctgcaaccaactacttcgcttatgacaccctgaagaaggtgtacaagaaggtgttcaagacaaatgagattggcaacattccaacactgctcatcgggtctactgcaggagctatctcaagcacagcgacattccctcttgaggtcgcacggaagcacatgcaagttggagctgtcggtggcaagaaggtttacaagaacatgcttcatgccctcctgagcattcttgaggatgaaggggttgggggcctgtatagagggttggggccaagctgcatgaagttgatgcctgctgctgggatttcgtttatgtgctatgaggcttgcaagaagattctgatcgaagaagaagagaatgagtgaattgtgtgcggcggatgcattacctcattagagctcagttttgcgacatcctgacagcaggcagctttcatttctttgaatcgagtggtgctggagctgtttgaagctcaagactcaggttactgctgcagtcagcagaagttcttaacctgcttttgcatttagtttgatctgataaattcacttctttttcccagatttacttttcggtaccacttatgttgaaaacatgcctttcgaaactcattactgggatgtatgaaaacattcagatgacataggcaatcataattcacaagtggtgaagctgcaactgatctgtgttctgtatgcacctgtatgagtgcataaagtttcccttgactgctgtttctatgtcttatgtcagcactgtataaaacagtcgtacatctgttggtctatgatgtcacaacagtgaacattacattaatcattaacgccaccaaaatagagaaaaaaaacattgcacattagacactactcagttaacaaatgggataaatcaaatgtatgttctaagaacgccgcactcaacaagtgaacagaaaacacctaaacatattccatctgtatgcatcagcatcacccaatttaaccagagctgacagaggagaggaaaaggtagaaaaggaatagccataacaagtccctaaactttctaggtttgttcctcgccatctcctgcgtttgcatctccaacattggccgccatcaattcctcaaacttatcagtctttcccagcactatctcaatctgcaggtatgtctcggggtcaatatttcccga

SEQ ID NO: 4919 - DNA, 3545 bp, Sorghum bicolor
cattcggtgacgtgccacaatgccgcatcattggccgccgggcacggcacggcactagtggcaggcctcggccgccggccgtcggtccaatggcggcaagccaccggcggcgacggggcgaaggtgatgttcatgagttgatcgttcgtgcaaatcagctacagagatgatttcaaaattttcgcgaccatccataggtgacgttgtgtcctccacattcatggccttgtttagatgcaaaaagtttttggatttcgctactgtaccactttcgtttgtttgtggcaaatattgtccaatcatgaactaaatagaatcaaaagattcgtctcgtgatttacagttaaactgtgtaattagtttttgtttttatttatatttaatactttatgcatgtgccgtaagattcgatgtgacggaaaatcttgaaaattttttggttttggggtgaactaaacaaggcccatgtggaatttcagatgcaaatgaatgcgttgcacagaactagaacgaacatgttcacatcgatttcaggcaaagtttgcctttttaatctcataatatataaacatgactgggtttgtacttgaaattttgagaaattttgtatggatgtacttcctcgttccaaaaaaagagtgtaattttagatttgaaccaaatcattctttttaaaaaagatgagtggtttggttcacatagacatttatgaagtttttctttggcacaagtccagaggagttttattgattgcagaaacatatcttttctactttattctcgtaccatacagtacggaagaggaggcatcatagacataaactgtttttctgttgttataaaagagattcaatgttttatatgaacttgcttttatctcctattggtagcagataataacaatcaatggatctctttgtatgacttatttatggtctagaaaccactactgtcatcatatctctgccctgaaaaagaaagtgtgacatccggccttgtttagttccgaaaagtgaaaagttttcggtactgtagcactttcgtttgtttgtgacaaatattatccaatcatggactaactatgatcaaaagattcgtctcgtgatttacagctaaactgtgtaattagtttttgttttcgtctatatttaatgttttatgcatgtgtcacaagattcgatgtgacgagaaatcttgaaaactttttggttttcagggtaaactaaacaaggccgtaatcttccgcatgccttccacatggaacttttaaaatgacatcaagttgggactgactgcagatgacaattgaagtagtaaacagaaaacctatcatacctcacgtttatatccttatcgaagtttctcttgatggctcacatcaaactttatataaacaatcagttaatgtgaagcctgtttgatgactgagctgaaatgttcagttcatagaaagtctgccagtttgtgccaaaatatatattactttcattgtatttaccatttagtaaatgtctcagtacattataacacaactcagttggccaacttattcacctgttatgcatttctggcagatacttccaactactctctgctaattcaactgcagccggatgaagtaatcttcaattcttcacttaaataatctttatttatgtccaccaatataacaagagcgaactgcagaataattttccaccaataacactttttgaccaagactacagattcagacctaagtttcctccatgggtccgaccggtgaaaatgaaagactgaaagacaaagcagttgcctggaaaaacaagcagcactttgaatatcttcatttcaatacacagctatgtattttcttattgaactggagtcaatgggtcaatgttttcaagaaaaattgatgagaaagttgcattccaccaaccaaaacagttcatgtatttatcaagaggcacaagtttcttctccatacctgtgtttgagtcaagaccaaacaggtagccatgaatgtccgagatgatactccaaagccacatttcgtcttggttccgttcatggcgcaaggccacaccattcccatgattgacatggctcatctccttgcaaaacatggtgccatggtcagcttcatcaccacccctgccaacgcatctcggatagagtccaccattgacagggcaagagagctgaaccttccaatccactttgtagccctcaagctccactgcgttgaggtaggactacccgaaggctgcgagagtgttgacaaagtcctaggtaaagagcaggtcaagatgcttgtcgacgcctacagcatgttatacaagcccctcgtgtcatatctccatgcccagagcaaccctccttcctgcataatatcagacctgtgccagccatggacaggggatgttgcaagggatcttggcatccccaggttgatgtttaatggcttctgtgccttctcctccctctgcaggtattaactactacttgtccattagttaaccatttttcttcttgctttccttcacatatacaaatgcggtaatgttttaggtacatcatccatcaggagaagatttttgaggatatatctgatgacaataggctaattgtgctccctgggtttcctcattgccttgaggtaacaaaggcaagatctcctaggaactttaactcgccagggtttgagcaattcagtgcgaaaatcctatagaggaggaacggagagctgatggtgtggtcacaaatagcttcgatgagcttgaaccattgtaccatgaggcctaccagatgaaaataggcaagaaagtttggtcccttgggccaatgttcctctgcaatactgacatggatgcaatggaatccaggggtgataagacatcagttgatgggaagcattgcttgcaatggcttgactccatgaaacctgggtcggttctttatgtcagttttggaagcatggctcgtactatgttttcacagatcgaagagatcgcattgggcttagaggcttcaaagagaccatttcttgttttatctccctagccggaactgatcgagggtcatcttacagcaatgtaaagcacctgattgagtatgcaatgactagggccgggagataaaacaagaagttcagtgatatgcccctattcttgtaccatctcttcgtacagtttttattactccatctgtccctgaaagcttcaattcctagagttgtcttaagtcaaactttttaaactttgaccgaatttctagaataccaaattaataccattagatttatcatagaataagatactcattttatgtcatagatattgatgctcttttctataaagttggtcaaacttaaaaaaaagtttaatttgcacggattctaggaattgaagctttcaggggtagagggagtatgcgttaaaaagggaacaagtatttatccatattccatgtattgtactgcacaacatgctgagaattttacatgccattcttgctgaagaccattactgtactgtacttgaaacagttgcctcttgttagat

SEQ ID NO: 4920 - DNA, 6178 bp, Sorghum bicolor
aagcctgttggtatggctcctcaagccctcctctggagtagtcaccccagaacggctttcagctcctctaccattcattccaaaatggttcagtgtttggtagagcttctccatagtagttgctactagagctagagctggagatgccaaataggcctaggaacctttgtagctccggcttctaaggaagctatactttggagaactatatatagaccacttctctttatctatcaaaggaaatatgaataccaatccataaaaaaaaagtgttattttacaggaagagtaaatttaactgttggtgaatagtcctattacagtctccattctacccctgaatttgctattactttcaattctgatcttctctattcaaaagggcagtctggtcattacatatatccggacctatgtttctaaggccttgtttagatttttttttgtgaattttggtactgtagcactttcgtttgtatttggattattgtccaaacatgagcttaaaagattcgtctcgcaaattacggataaactgtacaattagttattttttaattatatttaatgttctatgcatatgccggccgatgttacaggaaatcttgaaaaagttttggattttggatgaaactaatttgtcgttaggcttcgctcggtgagacgagtcatcgatgttgagtcttcgtgggcttaagagcctgtttttagttgtaggaaattttacaaaatggctatcataacattttcgtttatatttcacaattattatccaattatggattaactaagcttaaaagatttgtctcgtaaattacatacaagctatgtaattagttattttttatttatatttaatgcttcatacatatgtcacaagattcgatgtgatttcacctctttggaggtcgctgaatacttcggaatgttctcccttgtttatcacaatgtggagtctcccctgaacaacaagaacaatttgcggctttgaaaacacagtagtcaaacacatgttaaccggtttcgaggactgcgttattcgagattaaatccccaacactaacacttatatctgacttggccagctgacctgatgttgtccatccgtgatctacacccctcggtccctaaataaatcgatttaaggcactcacaatgcaagactctatcataaagtctaagacaattaattacatattatttatgatttttttctgatgtggcagcatatttattgaagaaagaggtagaaaaaataagaccccaagtcttatttagactctaagtcggtattgttagaggtaataaataactttagactctatgataaaatctgtattgtgagtgcccttatagagttgtcttaagtcaattttttaaaacttgattgaaattatagaaaaagaacactagtatttatgacattaaattattatcattagatacattgttcatttaattaatgccataaatattgatgtttgtttttataaatttaattaaattaaaaaaatgattgacttaaagacaacttcagaagttgattttgatttatttggagactgagagagtattaataaatcggtaactttagcactatgtttttttttcaactgattacaatgctgactgaccacgtgttgtcaatttatggggctaatcctatattgcaatgccactgacaaaaggaaaacaaaaaatatttaactcctatcctgcattattataccgtatatcctgcattattataccgtactagtacatgctgatgaatcaccgacccaactaatccactcccctcatggcctcatctcctgcgccgaacagacaccgagccgccctttccagccattgccgtcctgccacgtgtcgctccacagctcctgatcgagcgtccacacgagatcctcaccgttggaagattctctccctcaaaaacaaaaagatcatatctaacgacaataaaaaagtaaaaagaaaatatctaaataaacgttgccgcaccgccgctggagactgtgaagcgaaagaggaggaagaattcgagtccaagtcttggagctgccccccgcttgggtaaaaaatttccccttccgctagtgcgatgcttccgtgtttttatcatctttttccttttctatattagcgcgtagtatgcgttgatccacgggtttggcacccgttccttccttgcccccggcgcaatctttgcttccgcgacctcgccccggcgattttcctttgcggttctttattgcaaaattttgggcgcaagatagttgctgattcgttcggctttaagccgtcgaggtgattgtttggagtctggttctggaacctgggctgctcttcttgttcttggtggcgttggtcggtcacgggttcttgaatctttcagcgggcggccggggtggagctgcccctgcccgtggttggtgaggcgattctcggtcgggagcttccgtttctcttcggatgtaggtgtgtgtgatagtttctttcttagcttggattgctggctggtgaacttagcattagctagtctgtagcgatttgtggaactaacaattaatggacaaaatgtggtgccaagatagtttgttgtggcgctctggtttttcttctctcttgcaataatttcatagtcatttgaaggacataattaccatgctattcttttgattgaccttttggtaggcatgattgttgctgtcaccatatacaaagattgattttgttctattctttgagaagaacttaagattctaagttgaactgcatactcttccatcattgagatctgtggatgtgggttttcaaactcagggtcttctccaggtttggttttgaagttagaattgtagctgaagtgtatgttcacatgttcctaaacttgtggatcccttaaggattatcttagtattctacaactagggcgtatgtacaaatcaatgagaatccttcctgcagaaatttgcatgtccacacaggactgaagctatttggatgaattaggtcagtgaccttaaaggatagaatatggcatatgagcctcaaacctacctctgagaaactggattttgacacttggtctattgtgccatttcaattctgccttgtagtgaacaatctatcgtatctcaagatgcttcaatgaacaagaaatatttccttattttttcctaaaggttttcatgacatataacatttgcaaaagctgatacaaaaagagctgcaaaatttgcagtcatttgggtcgattttgatgcatatgatacatattagcagtatattgttgttacctctatgattatcttcataaagatatcaagttccttaattaaaaagggagcgataaagtgctaaacagcttattgatatcaagtgttccttttctttcagatggagtggatctggccttctactctaggggaaagagcaaagcacattatcttgtaaaaattagcattttcctacatttatctcaaatcaaatcatctctgcttctgggaacagcaacctgtaatttcccatgcaacctcttggttgatggatgctcttcctgttgaatcagaaagagaaagtcaaacagatagtcaccctttactcatggagcatgtgattggcatcccaagggatgatgttgcttctacatcaacacctcgtcgagacaacaatgatggcatggatcacttgcctcgtgattcagaaagttcttccggaacaactgctgcatataactctccgaatactcctatagcaagaagagatgataatcgccgtcgccgtcaacagagtctgaattctggcttctggatatcaattgaactagctgtaaatcttagccagattatagctgctatctgcgttctgtctgtgtcaaggaatgaacatcctcatgctccattgtttgagtgggtcattggttatacaataggttgtattgcaactcttcctcatctttactggcgctatctccagcgcaaccagctgcccactgtgcaaggatcaaatcagaactacgttccagacaacagctttgaaagtaattcttttactgggatttcgccccctcatgtgtctgaagctggtgttgtaactgtaacaaatggagtctcgagaaacaatacggttaccacaaatccaaggtaacatactgtaccttgtagatacatattattgcttctgtttatatattgattgttctttcatcatcaagtctctatatctgtgaaatttgctataagttgcttgaggtttagtactttacatatgagctattaacgaaatgatgcactgagccctgagtggtactgcaaagagaattaatctcgcaagatgtgttttcatgcaatcagagatcttctgtagttactttccttgcccacaagaagtaacagttcatgtaatatgtggacctggttcaggagtatgataaatcttgtcagatcggatctgttagataaaaaataaatggaaatagcttgtcacatggcacatggcacaagtaaaagaactcattgcagtaacctatctaacattttatagtccattgttctggtttcattgcagtataccttagatcaacaaaggtcatcagaatcgtaaagactttgctggttagttttctgagttgcattctccttgttgcagggctcaagctttcgctgatcacttcaagatggctctggactgtttcttcgctgtatggtttgttgtcggaaacgtgtgggtatttggtggacattcttcttcccatgatgcacccaacttgtacaggtgtgctgctaacctgccatgatgcagtacttttgcaacttatcttgatgtttcatgctgtactcatggtttcaggttgtgtatagccttcctcaccttcagctgcattggctacgctatgcccttcattctctgtgcgctgatatgctgctgcctaccctgcataatctccttaatgggtttccgggaagatctgaacgaaaacagaggtgctacttcagatgcaatcaatgccctgggcacatacaagttcaaaacgaagaagcctcgtaacacagagggaaatgaaggcggcggtggagtctttgctcctggaacagacaaggaacgagctgtttctgctgaagatgctgtgagattttctcttgccacctcatgtttgctttgcacctgtatctcctcttgcacatgatgtaaaactgactcacgtcctttggtcggcaggtttgctgtatctgcttggcgaggtatgtagataacgatgatctccggttgctcccctgcgggcacttcttccataaggactgtgtcgacaaatggctcaagataaatgcactatgcccactctgcaaagctgagatcgacatcgtcccgacaactgctcctccagccatcggatttgggcgccgccacagtgacaacagggtaggaaacgacattgaatcacaacggtaactttatcacggcttccatgatgtatagtgagagagcaacttgcctccgatgtgtggtttccagaagagcaacatgtaaattatgcagtgatagagattatgtgatgaatcaacgagtccttacatgatccagcgagtaatcgcctgactggaaaatgtgtctttgttgtcaatatgtgtcactatggctttgttccttccgaatttaccttcgtatgtcgtctcagtgaaattcgtcgcagatttgcagctggagcatcaaccgtttggtctctgaaataaccatgatggttttgtagagtagtacttctgtataggccaatctgcagctggctgttgctgcacaagaatgaaagtttttcatgttagtcagtcagttcactcaagaaagacgagagtgtccagagcaaataactatgatcgctttgtagcgggatcatcaagcgtttggtctctgaaataaccatgatcgctttgtaaagtacctctgtgtaggccattctgcagctagctgttgctgcacaggaatgaagcttttttcagtcagtcagtcagttactcaagaaagacgagtgtcgagaacgattttgaacatcaaccggccaaacacttgcaagcacgggacagaatcacgctatataattgcgtatcaggaaggtggatggcaaccaaatctcgataattgtacactaggaacgacgagaggaacctgcattgcaacttca

SEQ ID NO: 4921 - DNA, 7530 bp, Sorghum bicolor
tagagtaagtttttttctttttaattggtcaattgataaaaaagatgtgatcaactaattcttgatcaccgtccttgttttctttgtaaagaacgggtccgaagcaccacaccatactcaatctctataaatctcaggacaatcagagatattttagataaaaacaaaccgatggatagtggatgctttaatatggctattcggatggttgcatgcaacgaagctaggtttattacggaagatgacaaatggtgcttcatcgatctcaagttctgtataagttcatatagctgttcacttgttgtatgtaactaattgaataattactaattttgcaaaaaaaagagtaggatatagctcagattggacgagatacacggtgtcgtgacgagataaattacgaagagctagcataattgtttgaatgctggaccccgtgctactatattaaagactgcagcactgtaatattatatatatattatttaaaccttttttaaaaaaatattttattttgcacttatatcgtgctcatttacaggttctattgccatatcatcgagataggctctacattttattcataatggatgtgaggaagaaaattgtgtacattatggacccgctttctcctaaactaaagtacataggcaatgatcgatgtagtccgtatctaactacattacatgacattgcctatcatttcaaccatgctatgaaattggcaaatgctacatagaacactgatatttctatggcatcctcaagttccaacatggactccaaaaaattattcctgataaatataacttatattatgtttcatctttctcatcaaatagtcgtatcatttagctaccacaaataaacacttactcttctccacgaaagtgtcgggcttccttgtatatagttatttaaaagagtgggacgggaaaaattgtttgtccaccttataagagcaactccaagagcttgactattcttattatggaggctattttagaatttgtataacaaaaaataggctctaacagatgtgctatttgattttgtaaaatagaaagttggttattccttgattttcgttggccatatatagccaaccacagacactggctatctgattttgtaaaatggcaaggctgttgtggacttcttctttttaaagaagttttctattttacaaaatagctaaacaatggaatttggctactaattttagtcatgctcttggagttgctctaagcatataaactatatatcctctatgtaaattctgtagagtgcatagcaaattaataagttaatttactgtctgtcattcacaaagtggatattcactgaggacggaatacttactggacattctacagagtaattaaaatgaacgtgcaaacattatccctaaagagcttcgagatctacttaagcaattaggaacttatttatagtataaatatatgagacatagctttattgtttcttttcttattcacgagtgtattttgaattctactaattatcatatgcaattttctaagatcataaattatgaaaaatgtatcattgtttcgttgaaaatagttgttttcattaagtatatctctagaataaaactgtagcaacccaaggacactatactaattaagttcaatctctctcttgcaagccggagctccacgtcctgggaggcggccgggtacccgcgcgcggtaggggaagcgccagtttcccccagtacggtgcctcgtctgaaagcatgcaccgcatgcagatggtcaaaagggaaacagaagagataaaatccaagaaagtatacacatgcgccgcccgcacctcatgcatatggccaatcgcaaccccgcattggagccgcatcaaatagagccacaccgaggcgacgcgcgcagacccgggcgaggcgacgcgcagtgagaccacgtcgggattttctctcgacggcgatcgctgtgcgcgtgacaatcagcgagcgagatatggcggacggccaccacttcaacaatatctcactcggcggccgtggcggcggcgtgagtcgattctgttcattttctcccttaatattcagtaggttgaggttgagattgagatttaggaatcctttcattagggtttggcttggatataatggccatagtccctctgatccgcgggtcaggttcgaaaattttgttggtctctttttaattggaattttgttggttggtgtctcagcttgcagtgtttgatttgcttagagatcacaagttagggtttatttaagatcatcataagttagggtttattggatcggtatgtttggaaatttgagattataggggaacatggtttcttgagaaattttgtaagaacagaacttgtgggaacgaacagtctccttaaatggaacaattaataggcgttgttgcctaagcagtttagcattatatcttaactctgaaaattctagttttcttcggtctattcagaaatagtatagttattccgatatatataattgcattccttcagtccaatgttcaccaaaaggagcacaagatttatagttttcaaattttcacattccttttggtgtgaatgtgtgtgctttttaagggtcattattattatatattcctgtcatgctagctttttcagtagaaacttgtttttcaatcttttgctgttagaattgtgcatcttgcagtcagcttcattttttcaatgcaaaaggaaggaatgtagttcaaagtccaataaattcacgattcatgcattttatttatgattgttattgccattgttgaaattcttgtggtgatgggatggcttgtgttgtagaaccctgggcagttcaaactttactccggaggcttggcatggaagaagcaaggaggaggaaagatcattgaggttgataaaggtgatatcacttctgtggcttggatgaggattcctaaatcttatcagcttagcgttggaacaaaggagggcctctgttacagattttttggctttcgtgaacaggttatattctctcttttttatctgaaaaggaaattagttgtacataatttccatttctaacttcaagagatatattgaaaaataagatatcaaatgtttatagtctttctaatagacctgatagatgtgccagtgtctatgtttctcgctctgataattaaaatctttgcatgtcctaactccagttttgttccttcactttccaggatgttagtagcctgactaatttcatagagaagagcactggaatcacaccagaagagaagcaactttctgttactgggcataattggggcggaatagaaataaatggttagccgaaatttctatatccgctgcctcttggtttcctctgttttggtttgattatttttcctatcctttccattttagggagtatgctttgctttaatgttggttcaaaggaagcgtttgaagtctctctagcagatgtggcacagactcagatgcaagggaaaacagatgttgtcctagagttccatgtagatgatactactggggcaaatgaggtctgtgaattgcctgaatgtgtttcccttgatccatgtttactgtagttaaattttgttggtgctatgtgcttttgggctttggtacctcacagttttttatgtaaaataataaatgagttatttttacatacatatatcatggaatgataacaaaaccaccacagtatttgatattgcatagtgtctcttctctgtttctccactatgtaacaaatgatttttctgccatatatatgttctatcagtctcacttaatggttcaacatggttagtgttacataaatttttcaaggatttggctgtgctaagttggaaaccgttaataatagctacaattttaatggtccatgtttgctgagttcatctcatttctttcacgttgattgcagaaagattctttgatggatttaagtttccatgttccgacttcaaatacgcaattcgttggagatgagcatcgtacttcagctcaggtgagatcactgataagaacagtgtggaaaagaaaagaagacgcatccatgcatcacagaaatgattaaatttctcctttttagatgttatggcaggctatctcggttgaaattgatggtggtggctcatcagagatggctgttgttacatttgatggaattgcaattcttacaccaaggtgggaggatcctacaactctgtagtagaatattatttataaaaaaaaatatgatatgttgttgaatgtgttgttttgctaaatagctaacttctccttttctattcaggggtcgatacagtgttgagcttcatcagtcattcttgcgactccaaggacaagctaatgatttcaaaatccaatatagtagtattcttcgcctatttgttttaccaaaggttgtatttattttacatacatgctgagttctttttattgtacataataacatatgattctgtccttgctttttcacctatgcagtcacacaatccacatacctttgtggttatcacacttgatccaccaattcggaaagggcaaactttatatcctcacattgttattcaggtgccgtatcacacttcaatttcacctaattggataaaatcttcatccaaaagaattaatttccttactgtgtgaacagtttgagacagaggcagtggttgaaagggaactggcattaagtggtgaggttttggctgagaagtacaaggataggcttgagagctcttacagggtgatatatttactcatttatgatctatgttgtatgtttgcatatttcttaggattttatttacatagttacatgcattatttttgatttaatgactttgtttaagcttcttagctgtacagttctcgttgcaagtagggtggtcgttagcttctatttggcaaagttatgtaattgaataaaccgttatgtagaccgtactgcattacagggtcttaatatgttgatcatcccttctacttacatcttcaattgttgggttattgatttatttgtagggtctaatacatgaggtattctccaaggtccttcgtggcttatctggtgctaaagtgacaaggccaagtacattccgcagttgccaagatggatatgcagtcaaatcatcacttaaagctgaagatggtttgctttatccactcgaaaagggcttcttctttctgccaaagcccccaacactaattcctcatgatgaggtatgttttattaaagaaatataaaagttttgcatttaattattttgtcccatggttcactgttacttcctgtagattgagtatgttgagtttgagcgtcatggtgctggaggtgcaagcatatcatctcattacttcgaccttttggttaagctcacaaatgatcaagaacatctcttcagaaacatccaaaggaatgaataccataacctcttcaacttcatcaggttttatatgcttttgttgatttatatcattgtagccaacatggttttatgaatctgatatcattgttcctttataaattttcaagtggtaagcatttgaaaattctgaatcttggagatggccaaggtagaactagtggtgttactgctgttcttcagagcacggatgatgattctgttgatccacatctggagcggataaaaaatcaggctggtaatgatgaaagcgatgaagaggtattgcctcccttggtcaacaactcagtataaggttaccttctgtcaattggatgtacatttttgtgtaatctctcttcaaattaggatgaagattttgtggcagacaaggacgatagtggatctccaacggatgattctgatgcggatggctctgatgctagtatgagtggaggagacaaggaggtaactaaattttctcttgtagtatacacaacatagcaatggttccagaatgcaccagaatagctatagcctattggatgcactgtgctaacagacatcttccagaaaccttccaagaaggaagctagtagctcaaaggaagctagtagctcaaagccgcctgtgaagaagaagcagaagagtgggcctgatgaaggttctcaaaaaaagaggccaaagaagaagaaagatcccaatgcccctaagagagctatagccccattcatgtacttctcaaaggctgagcgagctgtaagttacttataaccctaaatttcagaaggccgcaatattgagaaaactgaatataattagtcaggggcgacgccaggttcagcttgctgagtgccaaggcaccagggtaaaaaaaatgttttaccactaaacagcttcaaatttaccatataatttaagacaattatatatgtcatttgagctatgcaccagggttattttgtcactggcttcgcccctgtaattagttggagaaactttcaacctctcatttatccagcccctgatttatgtttctttcagaacacaaggggtcctagaacttcactttccatttggttatatctctgctattttttcaactctactgtatgcaaaacacactaggttgcaatgaagagcacgtttttattatcttgatgaggcatttagcttaggattttgcaaatgaaacaaacaataggcgtacatgtcaaaaaattaacagacacttccccattgcagaatatcaagagcagcaatcctgaactggctaccacagagattgcaaagaagctcggagaaaggtggcaaaagatgacaggttaccagtccagctctatgacacatactatttaaaactccaatgttttctacatagattcttcctgttggtgatcattttttttacaaaaacaaccaagacatacgtggagagcatccattctaaccatttccacctttcaaattttgtagctgaggagaggcagccatatgtggagcagtcccaagtcgacaagcaacgctatgcagaagagtctgcagcttaccgtggtgcagccgctcagcagggctctggtgctggatcggaatgaaggttcagtcatttcgacagttagctgcagggctggattgttgagttatcagaatgggcgggaatttttaccttagcttttgaatcatgcatccaatctatcttagcttgtgtcactattaatatttattgactagaataccctaaagtcgaagctgaatggcgtcctttgacattaggtttagaaattttctgctggcttgcccaagaattcccctctcttgatgctctgttcagtgagggggagggttggtcaacagttaagcaaatcccgcgggataggaaaaaatgcagccaaatttcagagaagtacaactattttggcataaaaactacaaaattataactattttgacatgtatcatagaagtacaattattttcccatttggtaccatgaaaatacaactcttttgatacttgattgatactatgagaatagtatagttttagttatgtggtacccaatgtcaaaatagctgtagttctctaatacatgcca

SEQ ID NO: 4922 - DNA, 5294 bp, Sorghum bicolor
aaaattaagcctaaaactaaagtttaaggacctaaatagtcattttgaaagtttaggaatgaaattggacatcgagtaacagttgagggaccaaatagctattgttccatttttcaaagatttagctgaaataattaaaaaataaaaagacaaaaccaccgtcactatagcaaaaccaccatctactgtaacaaaactgccttcaaaactgctcgagggagataaaatacacgatttgaaaagttgagggaggtggtttgtccagttttagagttaactttcgtgaaagttagcaaaatgtctgttagagcagcatatccagactccttaaaaactgctctatctatctctctctctctctctctctctctctctctctctctctcctttttttaaaaaaaactactctctcaatttgaattatatgttcccctcaatttttttgcgaattatatgcctaaacatgttgatatctaaatattcactacattccaaattacaagactttttgacatttttagatatgtagtttttgctatgcatttaaacacacactttgtctagatatatagcaaaataatgtatccaaaaattcaaagttacattttggaatagagggagtacataacaaaagctatatatgtctaaaaaaccaaaatattataatttaaaacgagggagtacttgtaaactaataattatgtaaattaaatttggaatgaagtcaaaggctctatttgttttagcttcttggtagcttttggatctcagctttgggatcttctaaaagccaaaaagctctcatgagctaaaagctcactttggagcttatggcttttggctttcaagatctttttatctttcggaaggttctaaagctgaggtccaaatctctcagaatgcctagacaaataggccccaaagccagaagctcttcttttggcttaggtcttatttagttgcaaaattttttgcaaaaaagatattatatcactttcgtttgtatttgataaatattatccaatcatagattaactaggttcaaaagatttgtctcgtaaattataggcaaactgtgtaattacttattttttatatatttaatgctccatacatgtgccgcaagatccgatgtgacggggaatcttaatttttttttgtaaaatttatgagaaataaaacaagaccgtgtgaggtttttggattgtggaaagtcccaaagctgcgatcaaaagctcctagaacgctgaaacaaactggctaggaattgttggtgtgtgaagagatatattgaatgctttttcttggaatgacttcttaaacaaagattttagagagtcagttaaaaaaaagacggatgaactcacgtttgagatgggcgttgatcgttgattgttgaaaatttacggccttacgggaaaggtccctttaattaatcttaggctttgtttagtcacgtccaatatctaaaaactttttaagatttctcatcacatcaaattttacggcatatgcatagagcattaaatatatataaaaaataattaattatacagtttgttcataatttataagacaaatttttgagccacttagttgatggttagataataattatcaaatacaaacgaaaatgctacgatatcaaaagcttcatctatcacatcgaatgtttagacacatgcatcgaatactaaatatagattatttacaaaactaaaaacacaaatagagaataatttgtgagactaatattttgagcctaattagtctagtattagacactaattattaaattaaaataaaacgaaaatgcttaaattttaacatctctaactaaacacaccctaaaccaggccttattattattgggtcgaaggaaccttgtttcgtttcagtgggctgaccttgccacttgctttagcacggcccaacacagcgccgccgcatccctactctcgaccacctcccactcgcgcctacaaaggcatcgctttcggcgccgccgcctccccggcctcctctctcgctcctctcgacgcgcatcacatcccatacccatgaccaccgaccgtctcctccactttctccgagcgccgacaggctctccggctgcggcccctacccgcgcggctcgccggggtcctctacaggcgcagggcgtccacttctgtcagggagctgcggtgatgcggcgcgcgtccctgtcctgctcgggcactagctctggccgggaggggggactgacgtacaaggatgctggcgtggacatagacgccggcgccgagctcgtgcgccgcatcgccaagatggcacccgggattggcggcttcggcggtctcttcccctacagtaatgagcttgcatcacttaatctctgctaacttattatccacttttgtttgaagcagccattttttttttctgaggattcttctacatgtgccgcgatttgcaactcaagcagggagtgagcaaaaataagttgggtgaagaatggttgtcaattaaatgtgaattaattatcaattttagctggtgaaagatgcaaatttaatgatcttgttagagatatgtcagtgcgacaattgtaggagaagtctgcagtatgcaccatgtagtgttttggacggtttatttgctactgctcacctgatgcagcaatataataccaattttgtgatccttccttgcactgctaattctgaaattttgctttcctgttgctttatttgaacagatgacgattatcttgttggtagcaccgacggggtggggacaaagctgaagcttgctttcgaaactggcattcatgacacaatcggcattgacctggtatgagcttacttgcgatgtacactgtttttattatctctgttgcaaatttgctgaatggatttaggttattgtggcaggtggcaatgagcgtcaatgacattgtaactttaggtgcaaaaccattgttcttcctagattactatgcgacgagcaagcttgatgttgatcttgcagagaaggtacttacagtttattttctcactgaaatgaaataattttcgccctgttcatatttatttacccataaatactttgtaaaattttgtaggttatcaaggggattagggatgggtgtgaacaatcagattgtgctctcctaggaggggaggtaagatttcctattgaatttaccattacttagcaattcaacgatgcggtactattatccttgtaagctcattagctgtatatgaatggatcaaatgtctccaactgccagactgtctaccattgctgcatgtttgttatcttataattgtttgcttgattatttatctgcaatcatttggataactccctttactaagaagcagggatattaatgtttatgcttgttgattaataatatcagagtaacaaaatattctcacttttttttttgctttttatacctttaattccatatcaattcaattgaatccacatgaagcgttgcatgtttattacttttacgaaaagccaaaaacagttgaactgatcattgaatatttgatcgttacagacagcagaaatgcctggtttctatgcagagggtgaatatgatctaagtggttttgctgtgggtgttgtgaagaaggataaagtcattgacggaaaaaacattgttaagggagatgtccttataggtcttccttccagtggggttcattctaatgggttctctcttgttagaaggtattgtaccctttttgaattccattcgtttcaaatctgtaatatatcattggatttatgaatttatttatttatctcttcgtacttccagtttgatgaacactatatgtatctggttaatgatggttgaaaatccttaattttcaagggtactggagaaaagcggactttccttgagtgaccagctcccaagaaatgatggcataacaactactgttggtgaagctctaatggcaccaactgtcatctatgttaagcaggttgggttttcttatgtgtatctatatctcatatttccttcaggcttttacagaaattttaatttgaaatgaaaaaggtgcttgagattattaagaaaggtggtgtgaaaggactagcccacatcactggtggtggttttactgacaatatcccaagagtatttccttctggactcggggcaaagatttttactgggtcatgggaagtgcctcctgtcttcaactggcttcaacaggcaaggacaaatgatcctcaagcttcacctatgattttcagcatctgcatgtgctggatagatactctgtacctagatctagttacctttaacatctatcattacatattttgtaggctggaaacattgatgatgcagagatgcggcgaacattcaatatgggaattggaatggttcttgtggtaagcagagagtcagcggacagaattatcgaagacacccatgggtcaaatcatgcttatcacattggagaggtgatcgagggtgacggggttcagtatgtctgaccttttatgccttcattgcttgtagtggcttgagacttgttggttggctgggcaaagcagcccagtttatgtaacaacataatcttgtggggttaagttctgcaccactgctaccgctagaaagcgaagggtaaccaaataattatttgagtggttccacgggaacttgccctgaaacggctgatactgttatttgggacatggtccttttgtccagagaaggccactggggtgaaattcagatgtccagaattttcatgcagagcggtatcagtttcgtttgagtaaatttaaataactaaatttatttatttggtacattttaatcgtttgcatttaactgcacatacttggcttatgttgtcacaaaacaaaacgtgcaaacctggatatgccatagacattttgaggtcaacaagtggaacactgttaggcttggttcggttttacgggaatgattcccagccacagacttcattcgcaattttgaactagtcgggaactgttccatgccgttcccagcccattccgacgtaaccgaacggggccttagtgatttttcgcagatttatcacgggaagtgttccaagattgtgcgttttctttgcgatgaaaaatgaacttgtttgggtcaggcataaggtgatatgccgctcaaaaaattggtattttacaagttgtgataatatgcgttgtctgagttaaaaggaagtgcagttttgtggttatgtcaattccgcgtagtattatgttgctaaacatgtgcctcttcgaacagg

SEQ ID NO: 4923 - DNA, 4284 bp, Sorghum bicolor
aaagaccacagttgaaataatctaccttagggaatgtcactaaaaatcgtaattaggcaaaaaaccgtgttgaatttgacaccatccatccgaacctatcttgtaccccaaactgcacaccaacccaacccaattatctggtcgatgtagcaccactcatgaccgagagagaagaaaagatgccataacagtgacctttctcagatagtgcaaaagtgtcgcaattttgccagcaccactcggaaaaatgtgatgctctaacagcttggctttctgttatccatgacatgcatgttaggtcaagaccaacagaacaccatcacagcacagcaacacggagtagactcgctgcttgtccacattcgtataccttggggattgggcgtgtatatccaaaagcaacgaaagtgtcatacgtttatttctccatcctcgtgttcttttataatgtccatcatcgtatatggtcataagagaaattaaatgaaatgaccaagacattcatgttcttttccggttatcgattccagattattccagtagtggtcctgtaagtagataacacatttattgttttgcttccaaatttagcatattctttttcctcccaatacctttttgagagttgcaaaactacaagttttttggaaagacaaaatagaatactcatggagatgctcttagtgaaatacatgcacccaggtccttacacttttcccatacctttgcctgttttattaacagttaaattgagcattttattccttcagcttttcaagttatttactcgacgtcaggatccatgttctcactttgagtaatgaacctttccatgttccaggacccaaatattcaattcgagactacttattatagataaaatataatttctaaagatgacttattctttttaataaaagcggctgtggtgcaatcaatagccaactctaaaaatcattctcaaaaccagccacacgtagatatacatttttgtagggacatctgctattttcaaccgcctctacaaatatctttatctttacggaggttttagatgtggctgcctaaaggggctggatttagtattgtctctaaaaattatttatagaggtggttggaactagagccgtctctaaacatatgtgtaacatagtaaattttgtttttttccctaaatgaccttgaatagagaaacgaccataaccaaatttgtagatctcacaactttatagttgataaattgtttatttgaaatcatctattcaagaaaattatatttgaatttctcacatttaaaatcatatactcaacagaaattacgtttgaaatcataaatgttagtatttttttatataattttgataaaattttaaatcacttgacttctaaaaggtgagatttatttatgttttaagagagagagagagagttctgctgatttgaaaggacaatggacgaaaaattatatggcaaaacttttgagaagtaagccaaacaattaccatgtatttccttcattttaaatcatacgacgttttagtttttctagatataatatatttttttactatatatctagatgactagatatagtgtatatctaaatgtaggataatatatatatctaaaaaaatctaaaatatcttaatgaatgatgtaaaatcgtaaataatcgcgtgacagcaaaaccaagccctacaccactgcaaagaaaatactgttttcccagtgtgagattgtgagagtgacagcatggacccagaggtcagaggaacggcgacgagagcgagtgcggccgcaactaatccaatccgaaacagccgggcgtcgggcctgtcagggttcggcgggcaggcaggcaggggtacgacgacccacccggtgagtttgacccctcgcccgcccgcccgttcgtcggtgaagtgaagggatgaccaaccgagcagcagacggctgcggcgccgtatatatagccgcccacgcgcggtggcggaggcgctatgagccgagacgagccgagccgaggaagcggggggcctggcactagcaggaggtcggcggagggagcaatggcggaatctagcgggtacgggtccgtgtcggtggacgtcgagcggatctccttcggcggcaaggtccgtccggcgaattgcacctttcgtgcttccttccaactggagatatttttttcccctcttattaggatgtgaattgtgggcgtggctccgtttctgcaattgtatttgggttatgggcagggtaaaattgaactgtgtcgtagtcctttctttctgcatagaaatgattggttcggtgaaactcaatttttataataaaaatggggatttttgtttgtcatgtggtcaaatgctttcacttttcgttcttttttttgggtacccaaagttgtttttgctgtttttgtcatctctttctatcaaccacaggtgcacaaaattctgcactatcaatttcattttcgtagtttcgtgcttgtgctatacaataagcatgttggaattctaatgtttcttcttggagtcgctacctatgtttggtccatgtgtccatgtgttaccagaatcatccaaattttgccaaactttgttccacttccaagttgctcttttttttcccttggtgtggacagtgccgctgaaatagctgctaagaattgagtgcttttttttttcttccccaggagcatcttgtgaggacgagatgtggttctgtaaccgttgctgtgtatggagacgaggacaagcctgcgcttgtaacatacccggatgtaggtctgaattgtaagtgctaccaaagattttgtaatttactgatataactgttatgactgaattccacaatcggcatgcgaacattgcttatatgtttctgcttcctatttggcttggacagacatgtcctgtttccaaggattgttcttctgcccggaagctgcgtctttgctgctccacaatttctgcatctaccacatcaatcctcaggggcacgaggtcagtaatgctggctcaatctttgtgattaggtgtgctgggtttgtattttgagttccttacatgatctttgcgatggcaattgttaagagtcctacagttgggagcagctccgatatcatcagatgttccggtgccaactgtggatgatctcgctgatcaagttgcagatgtgcttgatttcttcaggtattgtattgtgacatgacattagttctaatgcatgacttcttcattctagaattttttaaattcgataaccacagctgttctgattttagttgcacttaaccagtttaggatctgtgatgtgccttggtgtcacggctggtgcatatgttctcactctctttgcggtatgtgcttttatgagtcggactcttaatagaaaaacactatccactgttgtgctaataaggattttatactctttgatagacgaaatatcgggagagggtaataggactgatgctggtttcccctctgtgcaaagccccatcgtggagcgaatggctgtataataaagtaacttcatctattagtaacaatttaccatttggtttctctcgtgccaagtaatgctaattaattaataatgacaactcatacaacaggtattgttaaatttgctttattattacgggactcaaggcctggtcaaggagtgcttgcttcaacgttactttagcaaggtaaggttcagatctcaatattctcatcttgttttattgggactaatagtttatagttttcattaactgacgtactgatataagtctgcagaaactgcgtggggatgcacagtatcctgaatccgacatagtgcaagcctgtaaaagtgttagtctcttattttttttcatttttgatattctcttagttgtataatacgtcataaataccaataggttttgcacattcctttagatatcaatcatcaactagtggttgcttactgttaattttatatgcagttacttgatgagaagcagagtgaaaatatttggcggtttcttcactcaataaatgagtatgttgctattcatttatttattttttaatgagtttgctatagaattcatctctagaatcttgatgctcatatgggtttcccctccaccaggaggcatgacttaacaaattcattaaagaagctgcaatgccgcacgctaatttttgtcggcgagaactcagagttccatgaggatgctatccatatgaccacaaaactggaccgcagatactgtgcactagttgaggtaatatttggatg

SEQ ID NO: 4924 - DNA, 4043 bp, Sorghum bicolor
aataatagttattcgctagtagttatctcttttgggtctaaataggtgtagctaataaaatagctaatgttagttgcacctctagataataacaatttactagttacatcaaatcagataataatagctaatagttatcttagtagcatttttttattaattgtgcatccaacatcctcgagctaataggtagctaatagttagccagctaatattagatataacaatatctccaagagactagataaaattatattctaaactacaaaatttagccttgtataaaataaaaaactcatccaaattatagagttctataggagcctttgtataggatagccagtgaggactgaggacaacatgctatctatggcaagcaaaaatttagggctagtaaacatactatcatagcaaaccacatagcacacatggactttaatttttaatttaaaaatctataaaaatagtctagataacatggataccaattcaaatagggtcttagacttttgagggtaataaagaggccaaacaaagtgtggacttaccgttttttatccaaaaaatatcatataaattctcattgatgagtcttaacggtagtttggtacaagtatctcagttctttgaaagaaaatttgcacataaatattttgaaatttccatcttagctattatacaagtatttgtaggatgttgaataactcgttagccccactcctaagagcatctccaaggcctttgcaaacaaactttgcattgccctatttgtaaaaaagagtagaaaatacctctccaatggttttgcaaataaggtttgcaaattggttaactttgcaaatagaggttgaggctttgcatatatataaaccttcccaccactttgcatctacaatttcggccttccacgtcggactccgtccccccgcccccccaccccaccccgtgcgatttctctacgcccgtccgccctccctgccgcgcgcgtgcccgccctccctaccgcgaacgacgacgtacccggccacgtctggacgacgtacgcggccacggcacgtgaacggaggtggaccttccctcgcggggaccttccctcggagaaggacggaggtggacggagccgaactgacgcgaacgatgaacgcggcctgggctgggcgccaactggcggcgacctggcctgggcggcgactggcacgcacgacgtacgtcaaaatggcgtgaagggaaaaaaacgcgcgggcgcgatcggtgaaaaaaaaattcgagggtatggtccacactttgggtttgccaagtctaaatgtaaagtcccttggagttggactatttttaaactttgcaaatgagtttgggactttgcaaaaaaaatcaaatgcaaaattcatttgcaaagtcctttggagatgctctaatgtcagtgttagaaaaataccacattttttcaattaaattctggtagtatcattttttattactgtattacgataaagctttaaaagcaagactcaattttcatatatatatgaatgatattttttagacgaacatatctttaaggaacatctaatttgtgacatgaacaatgatattccaggtttgcaagaaatttgttacagtttactaggagcaaattgttccatgttcaggagaaaaacagtgccggccaggagaaaagcgttcagcttggcaataaatttttttcaggttcagaaattatctagaggacgagacgcaagtaccgataaaagttgcgtgatgattttcgtgtcccgcaaacgaatttacacggcccacgaagcgcacgagacgtgatatgggccttccgccacagttcgactgtccccacttctcttgctgcccgggcgggaagcggacgacagtttcccgcgctcagacggccgccgctccatttccactccttgggtataggttgcattgttggagacagtctaaaatttcaatctagggtgtcttccgccagtgaatcgccgatcctcatggctcccaagcgccgccgcgcggatcagggctcgccggtgccggcgccacctcctgctttgcggacggcaaaacttcagccggtggtcgtcttcgcccacggcgccggtgctccttcctcttccgactggatggtccagtaagctctctctgattctcgcccaagcggtcaactggaccttgtgaaacattcgtctcctgtggaggcagtgcctgtgtggtgatgtgctaaactgtcgattggttctgctagttggaagaagatggtgcatgacgcattggatgctgtcgacgtagtgacctttgactacccatgtgagttgattcagtatttcagtctactacttgttactcttggttcttgtatcaaaatttgtcagcaagagctaagtggtggcatggcaagataacaatgtgaactcgcagatatgtcgggtgggaagcgcagggcgccgccaaaggcagagaagcttgttgatcaccacctgggcatcgtgaaggatgctgctggcaagtatcaggggcaccctcttattttgatggggaagtccatgggatcgaggtagttttgggtggacaatgttactgtttgtttcattatttgtgcatcttattcgcttagttcaacatttgaatactttagattgtaatgcttcaattcaacgcacatgttgcactgatacgaatatctgacaatggtgtattcaaaattgtcagggttagctgcgtggtggcaagctccactgacattgatgtttctgctgttgtttgcttgggttacccactaaaggttggtctgcacattgtttttttttttgggttcccttgtacctgaatattaccttctatcagttaaaactcttaatctactgtccagattaggaatggatttgtattctggatttgtatttcctctgtagtttttattaggaaaaaatggtagtttctgtgactttatagttgctgttcacctagtatgttgtagtgttatgcagtgacctttttattacttacatttttgctctaagcacattccttgagatgagactacaaatttctttttgtccctggctgaacaagcatgttttctgctccttcctgtactgataacaatcaaattataattcgaagaatcatttttttccatctcaccatgctttgttcgacctagggagtgaatggagcagtgagagatgagacactcttacagctgaaggtaccaacgatgtttgttcaggtaatggaatttctcttttttctgtttctaatattgtaaagtgaaacaaatagtaaattgtttttttttacattcattaccagggaagtaaagatgccctgtgccccttagataaacttcagtctactcgcaagaagatgacctgcaagaatgaactgcatgtcattgatggtggtgaccactcatttaaggtcggcaaaaaatacctagagtctagagggttaaaccaacatgatcttgaaatggaagctgttaaagcaatttcgcaatttgtccagaactccataactccgaactgtacctagtccattttgtatatttttcttaacaccctcatggtgacgtgaccttaatctttggctttgaacaaaattattaatatgtcaatgtaatcctttggtgtaagatgctagtcctgattgacagtctgcactctgcattatatgttgttttggcgtcacttgatcacacgttggaaattgtcatgctgccatctttttttttttgacgaaactggaagggccgtagcccctgcagcaaatttattaaaaggcgaaaggtcttacaacagcaaccgaatcaaggcgattcaggaaacaaagaacgagacaaaaaagataagattaaacagacaagctaatttatcgattgtatccattgatcaaactgttgtttaagccttgtcttgactctgtaggagaccatctttgcttccttgaagaacagatcttttgaatcattgatactgagtagattattctggaaaattgcttcatttctgaccttccaaattgtccaagccatg

SEQ ID NO: 4925 - DNA, 6666 bp, Sorghum bicolor
tgctcctcttccctgcgttcggtgaaggtagtggcaactgcgacggggccatggggtagtgaaggtgcggctcgaggtggcagcgacgttagtggcgctaccgaagcttgagtccatggccgtgcagatggagtgggaggccaagaggctccaggtgtacgcggtgctaggtccgccggacggggcactgcagccggaggtgccgcatgcagaccgccacaaccgccgccgtgcaacaccttttctaggccaccgatgggcgtgcagcgaggggcctcggcaacgttcccaagctcggtaaaatccagcaccggcgcgaccatcgtgacatcaaacgtgattggaggattggggaaacccaacccatcccaacctgattgacctctaaacccataaccacccatccaaatagttccatgcacaacccaaaactccaattattacccgacccattagcaggcccatttggactggaccgacggtccagtccaaatcagcccatccctgtcacatcatccgccgacagtccgccaccgctacaacatcgggggcggcccgcgcgggaaaaacccggcagtgtcccgccgcacgctcgccgaaaaatgccaatgccgccgccgccgccgccgccgcgggaagacttcccggcgttcccgtttgcgccgtacccgatccagtcggaattcatgtcgttcctctacgccgccctctcctctggccccggcgccctggccctcctcgagagccctaccggtcagtggccccgaccaccacatcctccctccccgccgccgtcctccaaacattaatgacctactggtctcgcgcacttttcgatgcccaccgcaggtactggcaagacgctcagcatcatctgcagtgcgctgcagtggctcctcgaccaccgcgacgccgccgccgcggcaccggccctccccagcggcgccgctggccccgggggtgacgacgacgagcccgactggttgcgggatttcacgccgctgccgccggttaaagagagcacgaagaagaaggcgaagcctcccgcgttgaggaaaacggtggtttcacggaaatcagacggatttggggaagaagacggcggcgacgacgagcgggagttcctactcgaggagtatgagagcgatagagaagacgtcgcgagacagggtgtagggaaacgagcacattgcggtggttgcagtagtagcgagggcgaggagctggatgatgaggaggacgaggaggaggtgatgcccaaggtctacttcacaagccgcacgcactcgcagctctctcagttcgttggggagctcaagaggacggagttcgcggggcggatcaggacggtgtgcttggggtccaggaagaacttatgcatcaacaagggtaaggatatctgctaaaaattgcagtcttttcttttaggtggtgccactgcatctaagacaggttaacgggtgatgcaattgcctacagatgttctgaagatgggcagtgcaaaccggattaatgagaggtgcttggaactgcagaagaacaagaaaagcaccaaagttaaggtctgctgatcttgattcattctttgtactattacctttttcaagtactttcctaacagttttacatactatcctttcacttgtttggccaaatgtaactattgtttattgccatgctactaactatgattaccagtgcttcttgacctttgtttattcaggaatctttgtaattgggaagttacttatcttctttgtttttcttagcatttaaatggaccaaattatttagacatatctaccttttaaaagcctgaccgttgttattgcttgattgccatatttatgtttgcttagcatttccggacttacattctgctacaatttcaacttggttgattactgctgaagtgctaatttgttattatggccgtgaatatgcagcttgaggatgataaacgaaaggtgcgcccagcaaagcgctcttgtggctgcccgatgttaagaagtagaagtctacagaaagagttcaggagcgaagtgtcaaaccaaggtgcattagacatcgaggatttggcacgaatagggaagaagattggaacttgtccctactatggttcgcgtgacatgatccgctcagctgaccttgtagtccttccttatcaatctttgttactcaagtctgctagagaatcacttggccttaatctgaagaacagtgttgtcatcatagatgaggctcataacttagctgattccttgactaacatgtacaactcaaagatcacgtcttctcaggttactctcacctttcattaacctttgcatgacaatctggcaaataacccctccattcaaaattataagaagtttcggctatgtatctagacatagtgtatatctaagtgcctggcaaaaaacttatgtatctagaaaagccaatacatcttataatttgaaatagagggaatagtattttgccctgtgtcataaatcattatatttgtttacaactgtattactttgcgtttcattcaatgaacttaaacatctatatattccacaccttttattaattatgatttttttttgtagaacataaatgacatatagctctatattttgtgtgcctgatgctcctcattcagtactgttgtcaaagcaaaaaaagagaatttaggcataaaggggcctaaacaaagagggtcttttagtggtggggttagcttagcttgccaatgtggttgtatgacacatgataagattctatatatggtttcatctggttcaggtttagaattttcattttgaaagcaacattcagtacatgacttcaacatgccttctaaattgacatattgactgtttccttgggctaaaactgggattctagcatttcttctgtcatgcgctgcttacaagtatgaaattgtgttgttcaggaaacaaacttaatcatcctttctcattttcctgactgcatttcctgatattcattttccttttggattgtagttgaagacagtcctttcccacctggatgaataccttaacagatttcacaatgttttgggagctgcgaatcgacgatacatccagaccttgacagttttaacaaggtctttcctacgtgttttgatcaataagcaagatggtgccagcaatatgtcttctatgaccataaaccaattcttgttttcccttgacattgataatataaacatagtaaaactttgtcagtttgtgaaagaaagcaatataatccacaaggtgaatttcttccaaaatgtacccattcattgtccaatgcccatgtgatctgactgttgccttttcaggttagtggatatgcaaacaagttaactagcatccaaaatcagtttgatatccagctccatgatgaaggaagcagtatagcatgccttcaggcattggttgactttatacgctcccttctgaacagcaataacgatggaagaatcatagttgcaaagcaaaagctaggtggacaacctgatgaagcatatcttaaatttgtgatgctttgtgcagaaaaaatattttccgaggtactaaattattcatttttgagtggccgaaagtatgtactgtagctacttatgaattttgttacttatatctgttatataggttacacaggatgcttatgctgttatcctggctggtggaaccctccagcctattgaagaaactaggctacgcttgtgtccaagcttaccaccaactgatataaaattcttcacttgcaaccatattgttcctcctgagagtattcttccaatagcagttacacgtggaccctcaggcatgacatttgatttcagctacaattcaaggagctctccttctatggtttgcactttctacctcatatctaacatccccgacccattcgcttctgctactcaagcatagattgtgaaattatgaattatttgtatttatcttccgccatcttctttccaataagcattgattgaagtatttatttgacagtatttataacatgtaccatccctcaacttgcctactggaaacctctagggtattatagacttgttgcaaaatgtatttacaagtcccttctatattcctgtgtttctttttgattcattaccttgtgatgttactgtgttaggtcttccttgtttatcctttttttttgtgtggaaatacagttactacatgggtgtatgatttcatccatctaggcatctccttaacaatgaagtctttttcctgcgattgttcccattttgatctgcagcaatgttttctggttggctggtcgatcctggtcgacctgggaccgaccaggcgattaatcgcgattaatcagcgaccaggtcgattaatcgaccctggtcgtccttggtcgtccaggcatatcagctggtcgacctatatatatacctctatatatacactatattatactccctccatactcaaaatagttgacgttctgagtacttgtgaagaaatcgcaaaacttgtcgtcgtgggtctgcagctgctgcacggacgagtatacccttgctgctgccgcccgttcggctcccagactgaatgaatggcttcagcgtctcctcggctctggtgcaaacaattaaaaagtgacccgttctctgctctcgcatagagagactcgtggactctcgcacgagcaccattaaaagctgcaacacgcgctgcagcacacgcctctctcttcctgctcgctggtcgtctgcgcgtgcgctcgcagggtcgtctgcacgctatttaataggggcaaaataggaaaactaacccctccttaatcattccttggttagcgcaatcctgtctaaaacgtcaacaaaattgagtatggagggagtacacaataaaggaagcatcaagactgcattactgtaaaccaacattcctcttcatcttcaactctttttgatgtaaaccaacatctccttcttaactatttctggagaactgggacaaccaacagcatctccataccccccacatatctgcccagtcaaaaaagcccaaaaacagagaacacaacctggtcgtccatgtcctaatcggacgattaatcacgataagtggacgactaggtttctggtcgacctggtcgggtcggacctcctaatcgagcactcctgaccgaccaggacgattaatcgcgattaatcggacgacctgaaaacattgatctgcagcttctttcgttgcttatagttttttgctgttgtgcaatattttttacttgaatgcactttatgctttgtaattcttgttttgcttgtgtttacagattgaagagcttgggcgtttcatttgtaatattataacagttgtgcctgagggagttgttatgtttttttcttcatatgattatgaaaggcgtgtatatgatgcatggatgaccgcaggcacaatttccaagatttctaaaaagaagcatgttttcagagagccaaggaacagtgctgatgttgagggtgtcctcaacaaatacaaggagacaattgaatcctgtagtaaaatttcccaagacacaggtgtcaatggggcacttctattagccgttgttggtgggaagatttctgaaggcataaacttcagcaatgggatgggtcgttgtgtaataatggttggcttgccttatccaagtccatctgatgttgagctgatagagaccataaagcatatcgaaagtatttctagctcatttttggttggagatgataaggcctcaagcagaaaatatgatgatgaatgtgaactccagcctggttatgatatatttcgtaagtgcactagaggtggaagagagtattatgagaacttatgcatgaaagctgtgaatcaatctattggtaagctgcttctcttgagcacttgtcatgcatatagcactgtttatattcttccttgtatgataagaagaaataattgcaggcagagcaatcaggcacataaatgattatgctgcaatgctattggttgactcacgttatgcacagacttcatcaaccaagaatttttcctgccctactgataagcttcctcaatggataaaagcacgactctcttgtgctcaaaactatggagaagttcatagatcattacatcagttcttcaaattcaataaacaaaaatgttgaaatactctagaaataaaaaaccaagcatttccactgttgattcaatgcaaacaaaaatacaggtttgtgtattgctctttgtgtttttttaattatagctttgtgtttgtgtatccttatgctgcctacttatgagcagcctgcacctgtgatcagagttatgtacggaattgtggtgacagtaatgcttcctctcaaggaattatggtaagatcaatatttcttttgtttgcgactgtaaaacaatatcacaaatataattattcagtctgcttttttttgaacgcaaattattcagtctgcttattgtcagtccttatcattgtttcaattctctgtcatgatagcaaatcatatagacctcattagtgatgtgtgttacagaactaatatgttggtatatttttgtagtgggagcagtgtactgtttgattgttgcaagttatgatatttacatttcatactcttgaaatctacaacctaggcaagtg

SEQ ID NO: 4926 - DNA, 4942 bp, Sorghum bicolor
taaatatagataaaaagataactaattgcatagtttgtctgtaatttgcgagacaaatcttttaagcttagttagtccatgaatgaataataattatcaaatacaaacgaaagtggtataatatccaaatccaaaaaaatttagatcctgtttagtttcacgagttaaagttaccacacgtcacatcgaatgtttaaacacatacatggagtactaaatatagactatttacgaaactaaaaacacagctagagagtaatttgcgagacgaatcttttgagcctaattagtctatgattggacacggattattaaataaaacaaaaatattatagtacatattaaaattaataaccccaaccaaatactctttaaacaaggcctcagtgcacagcagatagccagcctttgaagtttgtgacgcaggtggtgtagtcttccgagcacacggatactacatgaggcattgcagtgtgtgtttggttggcctctaaacctatctaaacctagctttttgcttgaatgggccaaatttagagtgtttggttgtctaggcagcccctggagtcaggctccatctgacctgctgtacagccagggctaggtccaagtagaaacactaggttagtgtttcttctggagctgactccgattggctctgtgattcattcccgtcacctcctggtcttcactcccattctctttcgctactaatccttttcaccggtggtgactagtcagctgtggtggtgttcgataaaatatgtaagagtcggtaatcttaccagaagagagaagaggtaattctatacaaaacatgatagacaaccaaacacacccaatgtcagccaggctagtgtaatgtacacaaccaaacaactataaattgacctaattagaacatgcttaagctaggctgacttaattttgctagccagacttgtatagaaaatgaaccaatttaggcaccgagccaaggacgaccctggtcgtggttccaaccaagccaccgacgacgacggtgacgaccttgacttgaggcagatgcgaccatggccacatgacaacatgagagctttgctgtcactgtattccgctcaccgtccctgcttgatctcactgacgtgtcttcatcacattcactctctttgtgatgaactgacgatcgagtccagggggttcccactcgcgcgcatgcaggctcgtgactctgatgagaccacgacgagagtatatgcatctgttcattctacaggcctggccaaggccaaccatgtggcgcagcttagctcaggggcggaattcagctccggtggctgtgtgagctggtcgacgtacggtgtggcccaacgtagcgaggctgtcctttcattttaatttcaccggcaacggcaagctctcatccaccaacacattctcaggcaaaccaggcagccacttgccaggaccgcgttcagtcacgcgctgtttgccgaacacctatgtcaaggtttggcatgtctctttccttctatccagacatgtcatctgagagacaggaaaaaaaaccaatgaagtaattatttatcatcatataaaaccgcactcaatcaatccttaaaaatccataacatattatcttcaattgtctgtctccacaccactttacacaggttagtggtcaattcatttgaatattcaagcgcatatgaaacatcatctcttagctgtaaagtggcaggggagacccacctcagttttaagcttgtacagtatactcttttctcttgaatgaactgtccaagaaacgtcactctccatatggacttttcttgagctctagtagtagcaaaggttgacttgaactgtctgatagagactgccgtatagttcaccatcacagcgcataaaggaaacttaaaacaatttgatctccatagcactctaattttgaccaggaatgatgtttcgctcagtctcaggatggatataagtagttgtgcattcatcgaccaaaacccatctctgcagcgatgcctcggtttcttgcaactctcctttctactgcttccatcctctctttcattgctctactcccaagagttgcatcccgtgacactctatcactgggttcctctctcagagttgaatcctacgaaaccagcatcttacaatcatcagatgggaccttctcctctggcttctaccaagtctatactgatgccttcacattctcgatatggtactcaaaggcagccaacaagaccattgtctggagtgcaaaccctgaccatcctgtccatgccaggaggtcggctataaccttgcacaaggatggcaacatggtactgacggattatgatggcgcagtcatgtggcaagctgatggcaacttcacggatgttcagcgtgctcggctcttgaacactgggaatctcatcattgaggactcaagaggtaacactgtctggcaaagttttgattcaccaacagacactttcctgccaacacagctcatcactgctacaaccaaattagtccctacaactcaatcgcatagtcctggtaactatatcttccgtttcagtgacctttcagtactatcgcttatatatgatgtgcctgaagtttcagacatatactggccagaccctgatcaaaatctctaccaggatggtcgaaaccagtataacagtacaaggttaggagtccttagtcatagtggggtccttgcatcgagcgactttgctgatggtcaaccacttgtggcctctgatgcaggaccagacattaagagaaggctaactcttgaccctgatggtaatctccgcctgtatagcctgaatagttcagatgggtcatggtcagtttcaatggcagcaatgtcccaaccttgcaatattcatggtttatgtggtcctaatggaatctgccattactcacctaaacctacatgttcatgcccaccaggttatgagatgagaaacccaggtaactggactgaaggttgtatggctattgtcaacataacctgtgatcactatgacaacaaatctatgaaatttgtgaaacttccaaatacggatttttgggggtcagatcagcaacatcgtttgtcagtttctcttcaaacttgcaagaatatttgcatcagtgactgcacctgtaaaggctttcaatatcaggaaggtacaggatcatgctatccaaaagcttatcttttcagcggaagaacctacccaacatctgatgtacgaacaatatatctcaagcttccaacaagggttaatgttttaaatgtccctattccacggtccaatgtgtttgattctgtgccccatcaccttgactgtgatcagatgaacaaaaacatcagtgaaccatttccaaatgtgcataagaccagtagaggagaatcaaaatggttttacttctatgggttcatagctgcattttttgttgttgaagtttccttcatttcatttgcatggttctttgttttgagaagagaacttaagccatcagaattatgggcagctgaggaaggttacaaagtaatgactagtaattttagaagatatagttacagagaacttgtgaaggcgaccagaaaatttaaagttgagctaggaaggggagcatcaggcactgtgtacaaaggcctcctagaagatgataggcaagtggctgtgaagaagttggaaaatgtaaaggaaggcaaggaagtgtttcaagctgagctaagtgtaattgggaggatcaaccacatgaaccttgtgaggatatggggcttttgttcagaaggatctcataggttgttggtctctgaatatgttgagaatggatcactggctaacattttgttcaatgaaaaaagtaatatcttattggactggaagggaaggttcaatattgcgttaggtgttgcaaaagggttagcctatcttcaccatgaatgcttagagtgggtcatccattgtgatgttaaacctgagaacatactgttagaccaaacttttgagcccaagatcactgactttgggttggcaaagttactaaacagaggaggttccacccagaatgtatcccatgtaagaggaacactaggttacattgcacctgagtgggtttccagtctccccatcacagcaaaagttgatgtatacagttatggggttgtgcttcttgagctagtgacaggcactagagttttggagttggtggaaggtccagatgaggtgcataatatgcttagaaagcttgtcaggatgctttctgctaaactggaaggggaggaacaatcgtggattgatgggtttgtggattcaaaattgaatcgtccagtcaactatgtgcaagcaagaacactaatcaaattggcagtttcctgcttggaggaagacagaagcaaaagaccaacaatggaatatgcagtccagaccctcctgtcagctgatgactgaatggtcaaacaaaacatatgctagaacaacttcattgagttgacaaattacttctagatggaaaaaagaagcaaaagaccaacactccaggccctcctatcagttgatatggctggtaagaagtacagttttgggtgttgacactgatgtaaattatctgtaaacagtatgcatttgaatttgtcactatatgatataagttgtagcatgtaattgaacttgtacagttagatgtaatcatcttcaagttacctgaagtggaactaaaccacttggacctaggtgtgcttccttctctgaaattctgaatacgtcttgtgtggtctgacgattgtgaaaaaaacatggaatcagtaaatatggataataatgtcctaccaactaagaagagtagaagacaaggacgaattagtgaccttctcctcatattgctgctccaacaaggatgaattaggatcttctcctgcctcctcttattgctgctgctgcgacggcgtcat

SEQ ID NO: 4927 - DNA, 2902 bp, Sorghum bicolor
ccaggccaggcccgcagacgtattttgaaagggtaaaggtaaaaatgtctaagtcatggctaaacacatgtatttaagatgagaaatccttataaattacaaaatgtcatgtataacaaagtattcatgtttggagtcttattttagcgaagcaaatgttagaaatcctataataacgaaaccacatgtttggagtcctataatagcaattatctcgattaatttagaattgcaacaattggagtggcatgtatgatatattcagttaccacttgaggtatttgattgggtggaagggtcaatgtcactcattctagttgttcacacccaaagtttcaccctttcttgttgtatacacacccaaggtttggaagcatttggctcatttggccagcacagtttggctccatagttgaagtttgcaatttccatttcatcctaggcacaattccatgttaaggaatatttaaagttctggttgatggggaacatttgtctgtacagtttgtttctaatactgaagaaccttctctttatcttcgcagtagtaccattttggttgactggataaaagagcacaacagaggaatctaacaacatcagaagcacagattaaaaaaactaagttgagccatttgtgtaaggagggtctgtttcgaagtggcagaagtgttcaatctgagctctatgtacttacttcattttaatccagaataccatgtttatcttggttgtcttgcttgttatatttgcaatttttctactatttcttaaattggttctgttccaaatttttttcagggaggattccatatactgaaggtcaaacagttttttctcatacatgttcagtatttgattattggtccttctgtgctagaagatacggtatattttcctattgctaattttcatttacagtatcatatactgtattcaataatgattaaaattccaaatactgtttcatatgtttttttcccgcatatatattggttccatatggtgttagaacaacttagcagaaattggcaatgcaaagagaagaggcacttcactaaagagaagaagaccaagtgggcagtggctacaacacccctagattgtcagttcatttttgactgattcatgcaccttagagcatgttcagtttaatggagcaaacttgaccccaaatcagttgctagaacaggaacattaatggcatttaccttccttgcacattcatcctatggtccaacatgcccctgtccagggtgccaaagttgcaacctttagttcagattgcaagatacctactcctttgattgacttaagtatcattttgcaaaacatgtctcaagtttgcatagaaactaagctgcttggactctgaaatttagcatgtacgttataactatattttgtgtattagagaaaaaacagcttcaatcatatgtacaacttgaacttaattgaaatgtgaaacatggaacttgaaatctaaaaccctttcccccacttgagcgtaaactaaaattttcaggagcggaacttataaaactataatttagcatggtttatctttgtcattgtttgttaaagtagcttttaatgatacattttattgtagggtttgggcaacagagaattccaaatatgtaagaagaatggaagctgacttagtgtctggaatattgaagattttgggtgacaagctagttccactggtactcaaagagctcagcttcatagagggtgtcacaaaagatctgcaggagctccaggctctagttgaggattccaaaagttgtctccaagaagtaggttacaatagaattaggagtggctcagcacataattggctcaagcagttaaaagatattgcttacgatgttgaagatttggtctatgagttttatcttaaggctgagaaacatgacacagatgttgatggtgagaagaataatctgggtaaatatttgcacagaaaaccaaaaaaagtgctactccaatgcagtacagcccacaagataaaaaatattaagacaagatttcctgcagttgtgaagcaaataaatgacttcaatgtaatagcaaaaggtttactagcagtccctgctcaaaatataaataagactattggagaaccgtcgttattgctaaaggttggtgaggcaaaagtatatggaagagatgatgtcaagtgtaatatcatttgtaagctgatcaacaataataggcgagagggaattcatatagtttctattgtaggtctaggtggatgtggcaaaactaatttggccagatacatcttggtaaaggaacactttgatgttacattctgggttcatgtgactcaagaattcaacatggaaaagctcattggaaaactctatgaagcagttgctgatgagaagtgatgtctgtaccttgcaatatatgtgcagaacaatttgagaaatcttgagtggaaggaagttcctacttgtcttggatgatgtttggaatgaggatcaacaagactggtataactttgaacaacatttcaacagtggagcaccaggaagcaggattttgcttactagtcgtagtagaaaagttgcagaattagtgaaatctatagagatagttgatttggcattcttgtcagagggtgatagctggaaattattctgtcaaagttttggatcggctgtagaatatttggatcctgagttcatatagactggaaaggagaatgtgaagaaatgtgatgggatgcctctagcaattgaaactcttgcaggagccctccataacaagagaggaatagaagcttggcgagccataagagacagtaaatttgttaatgtccaggatttacaagagagtatgtgcaaccttgatgctgagctattttcatctcctagatcatctgaag

SEQ ID NO: 4928 - DNA, 3565 bp, Sorghum bicolor
ggaacgtggggggagcctgaggatttggcagcgcgggtccgctggcgctatgtacagggtctccaggtgatcctgcagcggcagctggaggtgctggtggagcggcaccaggtaggcgcgtttgtgtgtgctgtcgctggcattgtctgggtgcggtgggttgctgcatccagggtgtttgacggaatctgggtgcaccaggtgctcgaggaccacaaggccacggggagagagaattgttctagcagcagaggtgagctgttatgctagcccttgttagtcattgccatcagatgaactgaacagactctgacatacatctatctcttgttgcagacaacaagaaacatgatgaggtgaagtatgaatcggatgatgatatgttgctgcaacgaaaagacaggcgcaaggtggagtttgcctttttgcgctcgttgaggatgatgctgccggtttactcaacattggctgtttgtttcttggcctgtcatattgcccgtgaagccatcctgccaagcgacatttacaggtgggcaatggaggggaatatcccttatgtggctgcatttaccgaagtagacaggttccttgggaactctttccaagactgccctttggatgcaaggcagctgttcaggccagtgcgagttatcggagcatggcaactggaagctgcagctggatccatagcacaaaaagtaggcttgaggcttccttcagttaacttctatgcaattgctcaccgttgtttgaaggacttgttactgcctatagatagaatcctcccccacgcatgccgaatttatgagtgggcaatgcctgcagaattatggttgtctagtaatcctgctagagtccctacacgggtttgtgtgatggctatcctaattgtggccctacgacttctttataacatcaacggtcaagggatatgggaggtgtgtttgtcacattgattacctttcttcaaaacatcctaggtccttgataaatgcatatgacctgaagtaacctttctttgcagaagatttgtgaggaaggaagaaacacaagtgaatctcaccatgatacgaattcatcaacttccaggaagcttgaggctagtaacagtgaggagtttggcacaagagaactgttgtgtgctattgcagctgcctatgataaaatcaatacaacacatggtaaatttgaatttcattgccttgtctacacattatgtttatcttgtagtacacatggtagtttgcggcatgcttgttctgactgtcagtagtttatattccacctgctatatacacactaaacgtaagaattgttgattgcatatttcacatctgctgaatccaagaccgacgtatgtctttttctgtcaatcattctgtgtttcaaaacttaacaaaatatgcataactgtcatacactacatgattattactcctctggtaataccctaacatagagcaattagcatcaacttttgccatgcacaaacagggcaaactgatggagaacattgaaccactttgccatgttcttcaattaagacagttttacttttgtcctttttttctttctaaagatgttgagtaactttgtttcagtattggaatgggaagtgcaagaatctttctatggtttctttgagttagagaaagtagaactttgcaaagtcaataagatgctatttcatgaataaaataatatggcatttttttgtgcaagattattacgaataaattactgacttcattgtattcttgtctatatttgaatttatatctttgataaaagttatcaagggttcactggacatattcttgatcttggttgacattttgtgtctggtgggaatacttcttaatggtaggatactgacttgaagttttcttgcagactactcaagtgatctccgctcttatctcaagtactgcaaggaagttatttttactgggattacattttcagatgaagagaatcatctaatagagatattttgggatatgtacaaagccagagaggtactgcactttgattggcagtgttgttaattcttgcttattttccttttgcatgaggtggataaaatatcatatatgaaactgttaaattgtgcccattatggatcaattgctttcccttatcatactcttgcgtagttcttcctgtccttgatatgtaactatgtaagctttaaacgacttgataagaaggtgtagcacatcagctaattttatagtaaactatctatagaatacaaatttaatccccatatttgaaaaaagggaaaaataaccagagaggaatggggtggggacttctatttgcagaacttttgcggcacttggttataagcacaaattgagttataccttgaaccttaaattttgtttggtgtaggatcctggttagattttattatgatagcgccattcttgttggcttgcacaaactttgttttcgaactgtaaattattttgatgcttatgttgtttcattgcaggatgataatccaaaagatcatgtaaaatcccagtccaattctgttgaagacattccaattacaaatggagtgaagaagcactaccgagatggagcttttgttgaagcaagttccttttctgcatcttcaggtcacgatgaaatgcaaatgctcaagtcagagatgcaagatcatggatttcattatatgccacctaggaaaccaaggaaatcagatggttatcttcgttataggaggaagcggctaagcggtggctttgtttatgttgcacatgctgattattacatgttgctacgtgcttttgcaaagcttgcagaaattgatattcgtatcatgcatattagtgtgttaaaacttgagaggagactcgcatgtattgaggagcaaattgagagaagcttgaacaccttacagaacttttctactgcaacaggagatgagctaagatctgtatctgactgaagctcctagtgtagtctcatactctgctgtactgctgttttggcatcttgagaaacataattgcccttgagcattatgcctcccagtattgctgtttttacgtatacaagcatttagtttcattcactttctcaatccaggaatacaatgtgattttttggtattatctgaatgtgtttatgtactgatggcacgcaaaggaataccccctccattccttttctggaaaaaaaagagtcacatgtgtaactgtcaagggactggtagttgtgggtaggaggccctcggctacggagttcgtagccttggttcgtcgtcttctccggcgtggttatgccgcacagccgtaggcttagttgagaggagagggagattggatgataatgatcttgcttaattctctcaggtctggttacaatggtttaaggcctcacggccgcacacagcaggagctgatcgctccttgattctaggcatgcaacaaacttgccaactaacaatatctttctaattctaataatatctttctattcttagccactaagattggcaaccgtggcctcctgggtgcggccagcgcgctcatgcgcacggcgtatgtcg

SEQ ID NO: 4929 - DNA, 2683 bp, Sorghum bicolor
ggaaataactaaaatgttggcctatatatacacctacattggagtcagacaatcctcattgaacctccgcaaatttgtaaggtattagacactgctgagtcctgaagcacctcctgaaatcaacaagtctcttgtcaacaatcaaccaccaaagaaatttagagcgacaaaggattgctttacaaagagccaaactaaaacgagcttttgtttgtgccattgttcctcacatttatcttagcataattcttatgtttggtcattggtgaccacgatttgggcagcttgttgaaagtactgtaacacaatgtgccaacaaacaaatatgaaaaaggaaggtttagactaagtacttcagtttatgagttttttttttctcaaagatgtgtgagactgagagggataagagcacaagcacacatgcacatacacagaggaaactagattacattcgctcgcgcctttggttatacatacaccaaccttgaccaaactcaatgaaacctattctgacagaaagacctcggccccagccaaaccccaaagatgcatttcctcagcaagcaaaagcactctagctaaattggggagaatgccatcaaaggcgcatataccaaacctgtaagatgcatttcctctgcagttcatgagtcatgacattgatctctatatccatatccatatatcttataaaaagcaacccccactagctttcaatctcaacatgcaaattatccacatcgtcctcccactaacttccaatatcttcatgaaagctattcatgtcatcccccactaagtactaaaaccatccacatcatccacaaccaagtacaaaagttatccatgtcatctcccactaagtgcaattacttcaaatctatcaaaatactaggcatccacatcatgacatagattcattttgctgctccatcatcttataattcgatctaatattctattaggctttttattggattcttccactagtttgcccattaaaaaaaaactcgacctgggtaagacagccttttgtccataggcttttgtttggaggcctcacacaggttgagaaaacccctgaacccctgccccacccatacacaacggcaccataggtccatagcccatgtgagaatgaccacgaccggggacagaccttagaccctgcactttggtgtgggatagacgaggagaatttttttaaccccatcttgaaaattggctcccccaggagtactcaagccaactaaccaactcagctagaggccctttcacactagcttgctattaaccagaaccaatacaagaacatgcaggtccagcacatacctataacagctttatttctaaagtcccactgcaacgtgcagggtatccttctagtttattaagacttaaattacactaacctttaaaggcatcttaaaaacaaattttaactagtgaattgatgaattgaacacagcatggaatgccattaaaatttcatgtgcctattctcacatgatctttcgtggaaaggaactttatcctcatccttcaccacctaatttacttcactcatatctgcaaatcttactaatgcagagtgcacgactgaaacaaagcaaaagtgataaacactgtagaacaagcaaatggagtcttgcctgtgagaaccttctccgcaagcccaatagaaggtgtggagactttaggacaagagtgctgacctaagcttacactggccccctggaaagaaaactgagactgccctcgaactgcagtcaaggaatgcaaatatgttagaaatggaattaatctgaaggagactacatctaggaaaggatatttgcttagtgcatgatattagggctacacaaatattctgtagaaaaacatttctgacatttcatgtcaagaaacaaacacaaaatgagaaagtcacttgagagattagggctgtctaaaaacagggcaatattccaaagaacataatataactgcgcaaatatttcttaccgctgaggcctttggatttgatcactcacaagacactgaaaccgagaatgttggatttagcaattaacatttgcaggctaattctttgtaacaatcccctttgccagtttgacagtagtcaaaaccatcatctacaagaaatatttccgggcaacaaaagtagcaatatgacttggtaaagaaacccattttggcagttcggcgctggtcaaaattgatcacccacaagataatacttccatgcaaccaagagaaggcgatgtgaatcatttccgctcacaaccgattactctctaaacttgtttacttctacgtcgagattggaggaggtaccaatgttgcacaaatgccaaagcaacctcgccatcataaacctctattcagagagacctatacctgttagattatttaccactttcatggttgatagactccaacgaatgacgaatcagttgcagcaatcccttgacattatgaaaactgaaatcaagtacttcccttacaagaacaactccatccacctgagtctttccaataccagaaagataagctgaaaatgaactttgcgattttctggtaccctcgaatgcattatttatatcctctgtctgtataaaaaataaaaaaataaaaaaatcaggaactagaatacttactcacaggtcacaatatgaagata

SEQ ID NO: 4930 - DNA, 6854 bp, Sorghum bicolor
  misc_feature (3767)..(3866): n is a, c, g, or t
ctttatctcccttaaaatagataaaaaacatctctctattttcacccattaggaaaaattgaaagctgcaagccaaaagcaatctccaaggtggtatcaaaattgtactatgtgaaagcagctgcttctgggaaagcaattttggttctacccgtgtggttgacgttatgatttatgcagtagaaccacttcaagaagctgaaccaaacatgacctaactatcattcattgagttgtaaaaggactaatttaagacctcctttaaacacatgattatcaaaacatagtaatatcaaaaacacatgattagagtgtcctcgcaacttaaattctaagagaccaaaagcacatgaaacattacttgagtgacctactggatggagaaacataaaaaaacacaaggaatcaaaaaataaagatagacatagataatattctaatacacaaagcctctcctaaattcttatcaaacaagtcattaatattccgagtgaatttcataggaatttgaaaagtccaatcttttgtcccaaaaaatggcccacatagaaaaatttcttatatataagattcggatcctataatgtttgttcctaaggactttttaataattttggcagcatgttcaatttgtttggccatggattctatagctaaaagacaactacccttgtgcaaggatacaaggaaactattacgtacccttgttgttggtataatattacatttataacatcacatctcctcacaaaaaggggttaaggtcacttcgcgtttgaagctctttaccctccttgctatgaaggctccgttgacttggggagcgttgaagctgcttcttttccatgcttctcttaatcttcatcagtacgacaacttattcttaaccgatcttattttcactacatggaatttcgtgcttatacaggatcctcccgatcgaacttgtgtaggtagatattgcctaatatggccaataatagtactacctctgtccataaaagaatacattttttgctttttaaggagtcaaagaattaaactttgactaaatttatataaaaaatacaaaatatattttcataataaatttatttaaatatataaatactaatactattttactaaaaattggtcaaacttgagcttgtctgactggcatggatcctataattacattcttttatggatgtttcagatggagttagggtactctcacctcctacgagtcattcggcggaaaactttttctaaggggggtaaaagaactcagaataatcatgtatctcatgcaaatgagtcataatatttcactaaaaagtgtttataataaacctcataaaactatactacgatacgagtctagctatttttcgcaaaaaaaagctatatcgatctactgatagatttgatagctttaaatgctatggaagtagtactatattttataaaactctgatagtatagatatacgcaccatttattgcatataagaaaaaatttcctccacctaccaatatagtacaaaattatatcactaatagttaagtagtaaatcatttttcgacccaaagattgttgaaattaatgttgtgcctactatgaaagagataataataataaacatacaaaaatcagagtagagtatctggtcgagagagtgcttccaaatttatggattacggaggacaatctatggaaagcaagtattgattgtgatgcaaaactttgactacaagagaagatataggaaaataaatgcagggattccatgcctactacacagcatccacgtcgcccccgtccctttcctcgccttgcctatttattcgcccaccgctggttcgccgcggccgcgcttcccccgctcctcgcgatcgcagtctcagttcagccagccatatcgtagaacaccttccgttccggcgctcgggtgtggagggccggagtaagaggcgccgcgcgcgatcggggccgggtgaggagatagctagggatcgatggggaaggcgcagtggttgagcgtcgcgttgggctgcgtggcggcggtgacgtgcgcggtggcgacgacgctggtagcgaggcgggcggtggcgcggtatcggtggagcagagccgtggcggtggtgcgcgggttcgaggaggattgcgccacgcccacggagcggctgcagcggatcgtcaactccctgtccgtcgagatgttcgcgggcctcgcgtcggagggcgccagcaaggtccggatgctgctcacctgcgtcgacgcgctgcctgacgggtaagtgggtaacggtcgtgcccacgtacgccctgcgcttcgtctgtttgttgttggttctctttctcctcggtctgcttcagtgttgcttgtgttgtttatgcatgggagggtttatggcttcgtgctagggttctagccaaatgaaatgtatttgcaatttctaatttgcggagtttctgcgatagtgcaatcttaacctggttcattctttattggcaccaatttatccttatttcttattattttctctatatcttgcatttggttcagcttgcagctagtacgacacaattgttcttggactaattttctatgaaaattatgaaactttctatatagtgaccatgttttgcctcttcaaacatttcaggaaatttgatgcagtacgatattacattatattcgcttcacagaattccatgttaatgactacttttctttgagttgagctatccaattggcaacttaattatgtcttatatgtagcatatggatcctttatttgttgcttatttgctaaccagatatatatattcatatatacatatgatgggcaggagtgaggaaggcatctattactctgttgatcttggggggacaagcttcagagtcatgaaactagagcttggttcaggatctatggttatcaataaaaaagttgagcatcaacctattccagaagacttgaccaagggtacaagcgaggtaaccaccatcatcatttcagtttagttcctttgtaagatgtatattatttctaatatactaatttaactattttgtgtaggatttatttaatctaattgccttggcattaaaaaactttattgaaagagagggtggaggcgatgagggaagggcacttggttttacattttccttccctgtcagacaagtgtccatatcctcagggtcattaattaggtggactaaggaattttcaattgaagaggctgtaagttataaaattattccttattatgtgtttaagtgaagtatccattcaaatagctgaatatttcttttataagaaatgatgtgtcaacttgatatgcaatccttaactatcttattactagttttatacaattaaattctatctttcttgcttggtttcctatatgattactgttgagattatggtttttttctcattagcttgtttgaacatttttgcaatattaggttggaagagatgttgctcaatgcttaaatgaagcccttgttaggaatggactgaatttgcaggttactgcattggtatgtttctaactacttacatgttgtgcgactaggttttcaatctgtggatagtagtttgagacaagatgtttaatgtataatttttagtggctataatctcttgatcctgcctcatttagctttgctattagtttgagttttaaccgatttgctaacgttttatgtgctagtgagagacccttgcctaaagaacatggatatttaaaacattgctgctatatgnnnnnnnnnnnnnnnnnnnnnnnnnnnnnnnnnnnnnnnnnnnnnnnnnnnnnnnnnnnnnnnnnnnnnnnnnnnnnnnnnnnnnnnnnnnnnnnnnnnnctatggtgtaaataagttattttggtaaccagttgcttaaacacatatatatattgctattttctaggtgtgctcaacatacgtaaataattgatattattatttttcattgttgtctccatggaaatggttgcgactatcttttaaattatatatatatatatatatatatatatatatatatatatatatatatatatatatatatatatatatatatattataaccaattcttatgtatctatatgcttactgtatagaaaggcagagagagataacagaacacctcacacgcattagggagtggtgactttcatatagtaacaaggccggtatatttacaattagactcctaaatatttacatatctaacatgtagacatgcttgtataatattatcttgtaattagttaataaatgtgtgcttcttgaagtctagcaaatttgcttttcaagttcgttgcctgcaatttattattcactaaagtatataataatatactaatcatatctttcttaatttcatccacttctgcaaaataggtgaacaatgctgtgggtacattggctatggggcactattatgatgaggatacagttgctgcagtgattataggagctggtaccaatgcttcctatattgaacgcaatgctgctatcccaaaaagtcagggccttcttaccaactctgacataacggtaatattcttttgtattatctgctttatttgtattctttgatttgataaatttttaatgtagaaatatttgttgtagcttatactattaatctatatgctctattcattaggttgtaaatgtagaatggggtagtttccggtctccacaaataccattaactccatatgacatatgttccagtgaagctgaacgcaatcactatgaccaagtaagaacttattaaagctttccattgtggcatgatttgtgaaaatcaagctgaaaaggcttgtatcaatgaatctgaaactagcacctcggatgcatatataggcttttgagaaaatgatctccggtgtgtatcttggagaaattgcaagattggtattccaaagaatggctcaagaatcggatttatttggttcttttgtgaattgcttatctacccctttcatattgaggtattttttcttcttaggttgtgatcttacgaagttgtatttattcctatataattcttctttgttaatagtttgaaatataaattaaaccgatgcaatatgcctaatctttacactaaatctgaaacattgttttatagctaagcttcccaatatgttccacttcgctccattgtttacttttgttctaatccttttgttatgatattggcttgacatctctgtattctttctagtgatttttttatcttaattaagacttcatagcacaatagaataattaaatatcattggcattaagaagaaacagttttataagaagacattttagctagccaatgcaagtgttagaaaaagccatgtatccatcacaccaaggatgaataaatgttaatagtaacaactagtcagttaatggttggaaaatattccttgtttcttgaatagtgaacattccatggtatctttcgaagtttctatgtctatctttattaacctcatttgcttgttttccctacagattaactacaatagctgaaatattatgtttgtaaatattcattgatcacatattaagtttatggatttaatgatttaaaccaatcctcattgaggatgttaataactaacttgaaactttgaaacatggaatatgagggtcgtgtgttttacatatactttttctagtctaatttgcatattttggggaactctatggtctaagtgcctaataagacgatatatgttgaatatgttataataattttgttgtttcatgccatctagtacaccttctctagctgctattcgtgaggatgattctccagatcttagagtagttggcaaggtgctcgaagaacatctgaaggttagttgtcattgccacttggctcttatgaaacaatgtttatatgttaatatggtacattttaatcaaacaattgtctcatcaactacatcattctcctcacagatacaagatgttccactgaagactcggagacttgttgttagaatatgtgacattgtcacccgaagggctgctcgtctagcagctgctgggattgttgcaatactacaaaaaattggtcgtgatggaactctttgtggcaccacctttgttagaaagataagaggcgaggcaaagagatcggttgtcgcgattgaaggcggtctctaccaaggctattcagtctttagggagtatctaaatgaagctgtggatgagatcctaggggaggagcttgcccccacagttagtcttagagttatggaggagggttcagggattggggctgcactccttgcagcatcatattcgtcaactagaaaaaattttgtgtaggcttcacataagtttaaattatctcctgctaaggtaaaatatatgtgcatttgtccatccaaatgttgtacccggtagaaatcagttcttatactgttgtacattgtccccttgttttgctcaacatgttctcttctcatcaatgtaaatgtacatgcagtggtaaaactgatatctagtgctaaacaatggatcattagaggtaactattagagaataataatgtccatgaactacgagcccaatgaggtagtgcaaatgttgattgaatgaatgttatggaactataaatgtatttgatctctatgagttaattagtgcatgtataatgcggatacatctagcttgatcaattggctattgcatgtaaggagccccgaatatatgtactacttactcattgaaatacgatagtttgttctagtgatattaatttcatcagcttgcacacacaactagaaatatcaactagaaatatcagtgctatattattacatcaa

SEQ ID NO: 4931 - DNA, 6381 bp, Sorghum bicolor
agcttgcctttcattgccaaaaatgccatgtcattgccctccaacaccacctgcttggctatcagctgctgctccttgtcattgagctcctgctgcttcaaatccagctcctagtgcttcaaatctagctccacctacttctcatcagcctccttcttcttctcctccaactaaacctccagagcaaccaactgattggacagggcctccacttctccttccttggccgccagatcatccttcaaggtccacactgcatcacgcaggtctctcagcagctgcttgtaccatggagagcattcctcgtcgacccattggtagaacccgcattcattgcaactctgcacctcaatcaccattacaatgaattccccatcacaatcacaactgaaaatccaaaaacagaacaaatgcttccttaccctgactttctagcagcggagatacctttgatcgggctgagcttggctccacgagatgaaccttttggccttgagcttcggcttgcagtcgcagaacacgctgggctcgtacgccagcggcgggacgcggtacggcaccgacgatccacgaccgtcgtagccgaggccaccctgcctgctcgaacccaccgagcttgtctgtgacattgatccccgccgccggcgccgccgaagaccgaatcagcggaacacgccgccaccaaatttgccggaaccctagcgcggtggaagagaagcaggggaggcggagtgggcggagtgcgagggagagaaccaggggaggcggcggggtattaaaggggtttccctgacagcccgcctccaataggccgggcccgcttacatctggcagcttttctaggacatagtcagtccccacagaccaacactagtcttttttgcacactttgtccttactcgtgcgcacccgagaactacttcccggtcggtcacccatctctaaatttctccaggtcatgcacgcttaactttagagttctttggagatgggcttccggaaaagaagttgcaacttgttggtttgagtccccttttggccacgtccgtgcatccagtgccagctgtgaccactctgggttcacaccagccatgcacaccatacctgcgcaactacgacacacgcgctcgtgaaaccgtgagagtcgggtctgataccattaactttagagttctttgaagatgggcttccgaaaaagaagttgcaacttgttggtatgagtctcctcttggccacgtccgtgcatccagtgccagctgtgaccactctgggttcacatcagccatgcacaccatacctgcgcaactgcgacacacgcgctcgtgaaaccatgagagtcgggtctgatatcattctgtaacgtcccgcctcccccacagaccaaccctagtcttttttgcacactttgtcctcactcgtacgcacccgagaactactttccggtcggtcacccatccctaaatttctccaggtcaaacacgcttaactttagagttctttagagatgagcttccgaaaaagaagttgcaacttgttggtatgagtcttctattaatcctattaagccctgggccgggtgttacaccgcccgcccgcccgccctcacgagcgccagcgtggaaaaccgccgccacgctggacgccacgtcgccaaaaccactgaccaaaaccaccatagggtataatttcgcctgtttcaaatatcttaatgtgaagattagacggtttcaaatgtgagggctctggttagacgactacttatagttgagggtttttcttttagactttttccaaaaaaaaaaaaagacggcatcggaaatccgcctgggcagcggaagggtggacggacagggacagcagggaaggggaggcgaaaaggaaaaaatatacaccccggtgccatccgccaggcggcaggttgcgctgcaggatggcgcttgcccgcagtggatccgaatcgccacccccgcaatagcgaatatcctactcgctccgcctctgtgctcgcccctcccgcccgctgatatgatatccatccattccaatcccacctctcccgctccgcctccctcttcgtcctcgtctccctctcgcagccgtccggcgtcctcgtctcgtcccccccaaaagaatccggacgtggactgaccactccttttctggtaagcactcgctaccttgttcggatggatttgctccttctattcggcgactttgtagcgagcttctttattcaaatctctacgtccagctttgctagcttgctgctgcggattcacttgcagctaccgacccaagtgtttgggggttttaaactgaatctcagtgtcccgatgagtcccgagtaagaattgacggtgggagtggcgatgtgaatggagccggcgtgcggagatttcagagcacagctatttgggagcagggcagtgttctgtacactgcttcggagtgtgatgacgactggctgtgagcctggagctgctggtcctgtctgcgtgcaggcccgcaaataattgggtttccgccaactgcagtggaagcatctagacgatgtgaccaggggcatatggtttctctaggttcaactatatcattagtcctcgctgaacacaagtgcgaagagctgcagagtgcagactagaaggaccagccggctagctgctaacaaaatttaagttactctactttttagctttttatggctgtccttatactctccttttattttgaagataaaccacttggtaccactatattctaatattgaagtgaatgtgtatgagtacactcggattatagaaattccacgcctgtgattgcaaatctaatttgtttatgatgttcttcatttattccaaaaatttagtaatttttctcttaaatatgcttgctagaagagagattgggaaagaggtcttacttattgatgggagtataatagttaattgggataaatgtgtctttaaatctctatatgatacagggctaagacaagtccacaggagctaaataaataaataaataactcgaccaaggggggagacatccccctaatttgtcttaagaagagtgtgccgcgactcgacccaggctggctcagcaaaccgcttctttggtgtgttgtgctgaccagttgcaccgtgagagtgttggaacagttaactaatacaagttacagtatgttgtcaattgaaggaagtattgttcttctcgtgtctacttctgaagttttgctccatattctcatcttgtactgctctatttggtatctactttgtttttccccttcctttactcacccctaatttctgtctactactctgtagggcatttacatctctaagctcaaagaggaaggattatgaaaatggcgcacttgatcactaactgtagtttcagtacatctcctgctgttcagacattctccagttctcctaattactgccgcagtgttggccaattacagaactcaaaatcttcaaatttatccctcaaatcttgttccaggagacaaaagaagtcatatgtttcctgtgctagtgcagccgtacaaggacagacacaaacacctcttactggtagccagcaagcttatgagcattcatcctccaaacctaaaaaggtaatggttattggtggagatggatactgtgggtgggcaacagctcttcatctctcaaacaaaggttatgaggttgctattgttgataatcttgttcgccgtctttttgatcaccaacttggtcttgattcccttacccccataacttcaatccaaaatcgtgtccgtagatggaagtctctcactggtaagacaattcagctctttatcggtgacatatgtgattttgaattcctctcggaagctttcaagtcttttgagccggatgctgctgttcactttggtgagcaaagatccgcaccatactctatgattgatcgttcgcgggcagtctacacgcagcataacaatgtcattgggacacttaatgtcttgtttgccataaaggaatacagtgacgagtgccatttggttaagctaggaactatgggtgagtatggaacaccaaacattgacattgaagaggggtttatcactattactcacaatggaagaacagacaccttgccttatccaaaacaagcgagttctttctaccatctaagcaaagtgcatgactcccacaacatagcatttacctgcaaggcttggggtataagggccacagatcttaaccaaggtgtggtctatggggtcagaacagatgaaactgcactgcatgaagagctatctaacagatttgactatgatggcgtctttgggacagcactaaataggttctgcgttcaggctgctgtagggcatccacttacagtttatggaaaaggtggtcaggtatgtctttgttatttcttgatatgctacatatggaacttctcattttatatggctgttcttcatcccatccccccgccccctcttttctagaaatatgacaggctcaaattattagtgtccatcagtacttaagatgccaacaagcagtggtttaactcactgcttgcatttttgccataaatcttgggaactcgaaatcatgttagctgtagcccctcagcaagtattgaaattgaatttgtgtcattcttttttgtttgtttctgccaaatgatcaaaacggtaatgatttggtaacctgctggttatatatcctgagtgtgttactctaaagacctcactgattttcctaagatcacctgtctgggataagaagtccagaacagtttctttgcctcacatggtattccaaactggagactccgttgatcctactgctgtactttgtagttcttctaagcttgtcagccacatttttttaataagcaatctaaggctgtggttacacatacaaacaccattcttcagatatctcgtgcaaaagcgaccatctcatagtcattagctataaaaaaaaccgtacatgacagcgagatttgattaaacattgtactttcagtgaccacttgaaattacttttagatcagcaaagtgtggcataaatttactgaacgaactttttgttcctttccactccagacccggggatatctggacatcagagacactgtacagtgcgttgagctagcaatagccaacccagccaaacctggcgagttcagagtcttcaaccagttcactgagcaattctctgtcaatgagctagccaaactggtgacagccgcaggagcgaagcttggtctagaagtgcagaccaaatcggtgcccaacccacgagtcgaggctgaggagcactattacaacgccaagcacacgaagctcattgagctcggcctggtgccccacctgctctcagactccctgcttgactcgcttctcaactttgccatccaatacaaggatcgggtcgacacagcacagatcatgccaagcgtgtcatggaagaagatgggtgccaagccacggacagtctctgtttagagggtgattcaacttcccctggcttatagtgtcaaccaacattgacattattgacatatgtaatgtaataattatgcacattagtatgatgtgctaggtagtgaggtgtttattacgatattaaatttcatttttgttgccggtacaactgaagttcatgtttgattttgttgcccactcgagctcttggtctaatgcacctgagggttaagctgtcatatgtcgccattcactgatcgaaccctagtgcaacgagtgtagatcaagatcttgcaagaattgttagtagttactataatagaccaaatggatccatgattctgttcttgcgcagctatttggatgtaaaattgaagctgagtgtaaatctctttgctaatattatgtctttgaaatcgccattcggaaggcataacatccgtaggaactttataaaagccaacagtttaaaattttgatcaaaagtagtttacaggaggctaggacagtcatctaaatggtgcatgaacacacactaagagacataatcgtgttggttttaaaattaattttgaaaaaaaacttatggcaagcttagggtggttgttcctacgatacacattatgaaagatttctcactcaagtgtatattttgcgtggcgtattttgtttgcaaaagtaagcaaggttgttggtagcgtgtggttcaatgactgtgcttctttgcatggctcaatacaaggtcggtggagtgaggtaaagggtcagccgatcataggaagggtcggccaacccctatggtaggttggggtagccatccttcatctagaaagtgtctcacatatcatggaaaggtggaaaagatgtgttggctcacttttgacgatcggccgaccccctac

SEQ ID NO: 4932 - DNA, 7110 bp, Sorghum bicolor
aataaaaacaggacactgaaacctcctctacacctacagaaatttctgataaataattatattataataaaaaacactagttatatcataataaaaaataggctgttcgcaatctttttcatttaggccctattcatccaagcttatatgctaattttttctactacctagtaatatttttctttcaagataaattagcaaaccgtaatttttatcatagcttttcacatgcaaacaccctgtcgctccactgcattcaagcagaacaagaaacaataaaaagtatttccttcatcgcattaaaattgtttttttttactttcgaacttttgactgtttatttttatttaattttttataagtaataaaataaataaattattattaaagtattttatgataaaaaataagtcataacagaataaaaaatatttatagaaaaatttgaataagacgcataattaaataaaaattttgaaagttaaaaataatattagagcaaggtcaataatagagacaagtgattaactataaaccaagtgattagagctaagttatacagtaagttgtctcatacttgtctctaagatatcttctcttttttattcattctcacaaaacttgctatttagacccaccactacctatgcatccgtgtctaacttagtgtttgcataaggtcattctcagtgggggtttcatcaggatgtcatgcacatttattagagtgtcatgtcagcaaaactgcactttttgcatgaaatgaagaggagagagaagaaagtagtttcaccatggtgaaaccccgcgggcgttgtttcccacgcggtgaaatgggatgaaatggctaaatcgtttcaccatcttgcatgtgatctaatcatttttgtagtaattaaatgctttgcccagcctaagaaacgtcaaggtgaaaatcatgcattgtggaggttgtttcattattcgtttcattgatgccctgtcagcggatttgttttggaaacagtacattgaaattggccactgagactggcctaaagccggtctcaatgcatagtttcatgacatagttatcaactacataaccgagccacatgagttttatgagataaaacttctctctcatatgatgaaactgcttcatttaatgactctgccaaatcaacaattttgcttatgtggcaccatatctaatgtgcataacattcttatgaaacatgcattaagactagcctaaaagctaaactgtcatctctcttatatcttctctcttctacagtaacattagcttggctataaatctattaggctagtctaaatgcatgttttatgacagtgtcatacacattaaatagggtgcaatataagtaaatttgctgacttgacagagtcattaaataaagaagtttcatcatgtgagagaggagttttatttccataaaactcatataactcggttaactagtttatagttttggtaactgtcccatgaaactatgcattgagaccgatcttagaccctgtttagtttcccacccaaaaatttttcatccatcacatcgaatctttgcacacatgcatgaaatattaaatgtagataaaaaaacaaactaattacacaatttggttgaaaatcacgagacgaatcttttaagcctagttagtccatgattagccttaagtgctacagtaacccacatgtgctaatgatagattaattatacttaatagatttgtcttgcagttttcagacgagttatataatttattttttattatagtttataaatctctttcgacatcttttcgacacatataacgtgtcactcaaaaaattttaatctccgatctaaacaggcctcctctcttgggacgttgggaggacgtagatgcaaaggataattttttaatgcaagaagtaaaggactgtcgcggcgaacgaggccgcgttattgcgtactcctacatcaaactccacaaggcaggcagtagaggacgccattattatcgggctctattatcggacgagtaaccatccaatcaaacaacattcaaatcgacgcaaggacgcatcgcatcgggcaaatttaccgaaccatctctctctcttctcttcctccctagcgtacgtgtagccgagctacgctagcgtctgaggaaagacgaaggaagctacagcggccgaggtcccccattcgcgcccaccgaggcggcgaggcgtcgcgcatgcggccacccgcacccaggcgccgtcgcgggggagtgaggcgtgcaggcggagcaatggcgagcggtctgggccgatccgtggatctgtaggcgcggggggtgttggctggtgctggtgcgtgatgggatctgggagcagcaaggccaccaccacctcctcctcctcctcctcctcctcgtcatcgcgcacgttggcggaggcggcgggcggcgaggttaagaggccgaatgggagcgggaaggggaggagggggaggagccttttgccgagctcctcctgcttccgtggctccacgacgccgccgtgcgaaggcgacgcttccgcagcaccggtggacgtcgaggtaagggtgtttcatttccctctcggtgcttcgtgttggaatccgctgaatcgccaaggaaggttgttttcacaaatggaatggggatacgtggtagatcttgtcgctgtcaatttgttgcttcgtgaatcgagcatctagcctcggtttctgagcgagcattcctgagggatttgatattgttcgatggcttcgtagtttggttttcaaatttcagaaactcagttctgaacttctgattggttggatgtgccacgaaaatttctttccttaatttgtcctgtttggtttcgatcatgtcaaatatttttgaactccttgtgtatgaaccataaagcactaaagtgtactatggtatatgaatgaatagtacaacttgttggaactacatatgttgctgggttggaattctgatttctgaaacttcatccatctgtactttcctgaattgggttgctgttacagttttagatcaaaggctccattgctgctatagttaaatgatgatgcatttgtatgtttctagtgtaacaagggaggggagactgcaagcctgccttcactcactcacactgcaaagtctgatgaagatgttcttgcaatgcctaagtcttatcccggcgaaggggtagcagtaccttcatcagatagtgaaagagatcaagatgatgatgtgctacagaatgctgctgccactagcacatcaacagcggccaatcaattgccaaatccttctgggaggtcaaggccacgttttggtgtcaactttgggttgagtagagctgtcagcttgggatcatcagcagcctgctctattctgtcatctggcctcccgacttctgctaatccaggtgaaggtcggagagatgtggatgactcttctgatacaggcatctcccagcagggtactgcaccgactgctgggattgattcgactctggatatgcttagagatagtgtcacggcacaagctagagcagctcgtcaggctaggagaaatctgctagaatctgaagatgctagcttgaggagctcctacagaaggatggggtctcaggaaccttttgaaggcagtgttcggtttagccgaacattaagtgttgggcggcttcgggacagagttctcaggcggcctccattctcagatgggctattcaccccttcgcttctttatgatagggcagtatggccatctggaaacgctagtgctaggcaagattcagcagtaatgcaaaggactaattcagacaggagttcagaaccgcgatctgatccttcaaccaacgatatgtacaacttgagctctgagaggcaggccagtaatagcgacctactggagcgcagatcagcttttcttgagaggaggaggaggatacgatctcaggtagtttgaagttcaactttatttcagccttggttattacctctaagagttataagtttataacttttgctgtcttaataggtcagagctctgcaaaggttgggcagcaggtttgaaaatttatcaggtcatgagaggtcctgcatattatccggtcagcatagaacaggaaattgcaactgcagaacaggtagtcgacaaggcaatcctgatgaagaaactagcacaagggctagcatatcgagaattgttatgttagcagaagcactttttgaggtatgttttttaaatatacatactccttctgtccaaaaaagaatgtatgagtcaataatctcatgtttgatcaaatatatacaaaaagtactaatattatgatgtataataagtatcattagatcaatcatggaatatattttaataataaaattagttggagatacaaaagtttgacttagtccaaatctaggactacattctttttgggttgaaggtaatatttctgttcttgattggagaaggatactaacttgcatccttatggttatgactttcaggttcttgatgaaattcaccaccaatctgctgcattatcgtcatcaagaccatcgttttcttcaattggatccgttcctgctccaagggagattgttgagcgtcttcctgcaaaagtgtataggaaaccgttgaaataccagagcgatgaagctgcacagtaagacattatggcctatttagagtaatgttaggaaatttgttacgtaattatgtgaatttcaaacaggtttagtcctatgtttcactgtttcataaataggacaagttcttttcagtgtgttaaactccttccagagcagccactattatttgcccataatgttcagtgtctaaactcaatcctaacttaagcaagcgatacataggctagataaagcatggttatacagcattcagacgaaagcacttggtttgtgatcacatgggagattggaggagcctaagacttctcactaggcatggcaaattcccaattttgcctgcaccttcatatatttcaatctaccattcaaagccaagtaaaataattattttatgtgtggaagggcatgcatgaaaagattgcagtgcacatgtggtctccacactttacaattggcatttaagttggtggttcatttccagctgtacagcacctgtacgttttatgagtgggagtgtgggattattttgtgggcacttgtccttgtaaccttgcgaccacgtattgttgtacaacttctcatttctttcatctatgcagatgctatatttgccttgttgaatatgaagagggagattgtctccgtatacttccatgccatcatgaatttcatctaacatgtgtagataaatggctaaaggagattcacaggtattcatcctcttatttaacaacgaggattctttacgtttgtgaaaaatggggttctttttaatccacatctaggaaaaagaaactggcaaacagcagaatcagcatgctataattatctccgtgtgatatttggagactattgacattatctaacaggaaatccacatgctctgtaatggtaaacctgttagtttcttgcaaagtatttggactacatttggtgtaaagttgaataatgagcctacattttggacacccccaaatctgaaatttactgccagtatgaagtatgaacggagagttgagatgcattggtgcttagtatcatcattatgcttcttcgagattagactggcatatatgctagaactcatgtggttagcgacaaaccatcagtgtctttatttttcctctagaggctaatgttaaccatgtcttctcctgaatattttattatttgaggacctctttagaatgtttgaaccgtaagcaattgttggataataggattactttttcaattttcagggtaaaaaaaactaaataagatgctcaaatagttatgcccgtgctgtttgaattctccgttgaccttgttactgaagttttacccttttcttctgaaattattcctgagcttcactgagcctcaaaattacagaacagatctgcaatcatcttgttggcttaagactgagaacctaaggcttagcttctgtactcttgagttgctaaaagaattagctccataaaatatgcatttattgtatcatacagtaaatatcagctggcgcggttaataaccttttttgctgatatggatttctatcttgttttctagggtttgtccactttgtcgtggcgatgtctgcagatctgatgcaccgagtagaaaggtcagctgattctgtctcttgagaatgcagctcttacagagaaaagtggagctcctggcatggttctttgatccaattccgataaaacctgcaaaacttctgcagatgttattttcatttcccccatctcttctggtcagaacagcgcaggatgctcctgtattctatggaaaattcccatcgcagtcatcctcattgtgaaactgatgacatgctatggtgaatttaggattctgtatggggcgagtttgttgatattggattgttggcttccgtttccttataccgatgtgatcatgtgacgtttgaacaaagtggggcgattgatgtcgggtgcagccattctggacaactgtcaaatctattggttgcacatgtacatgtttcctatttgaacaaaccatcgttttcacttttcagtcaccagggaaattagcacttcccgatctgtttggcatgaaggaatggaaaacacagaaatatataaaaaaaccgcaggaaaagaaagtaagcatagtggtaaactaaggccttgtttagttcacctcaaaaactaaaaaaaatttaagattcttcgtcacatcgaattttatggcacatacatgaaacattaaatatagatgaaaacaaaaactaattgcacaatttgtctgtaaatcgtaagatgaatcttttaagtctaggccttgtttagttcaccccaaaaagcaaaaagttttcaagattctccgtcacatcgaatcttgcggcacatgcatgaagcattaaatatagacgaaagcaaaaattagttacacagtttagctggaaattgccagacgaatcttttgatcctagttagtc

SEQ ID NO: 4933 - DNA, 15608 bp, Sorghum bicolor
agttccgggtcagagaattgacactaaaaaatccatgtccataggctagcatctttaatcatagagcaacacattaagtagtgtactctttcttacttcacaagtacaagcacatggtctactaacgacgattagcaatggtcaagaagtgactaggtctataatccttgtgttgtgagtgttggcctttgtgtggcatatttaggtcaagtagggggcttctacttttgttccattggtttctcacccactatgtcagttcctccccgcccaacacttcctcctccgtgtttgcccaatgcctcttcccggccattgcctccacacttgacacttgctcctgactagcagttattatctctatgtaccatgtgttttgtcctttgactcatgagccaaacgagctagcttaagctcgctaacgagtcgaatcaagccagccttttggatcgtttgtataatgagtcatattcagccctaatcaaaagaacatatatgctcctcaattgattatggatacaatataaatttactatcttattcttagttaaataataaaaattatagaaaataatgataataaattcatacttttttggttccaccaatttagtaaccttttagtatctcttggtatattttccttggtaccttttagtacctctatttttctagccactcgatccctcctcctaatggtctacatttttcacaccataataacaattctcaaatagggttataaatagataatgaattaatgatgtattatcatcattgcattaaattcttaagtctctagcgaaagaacttacagcttagtagttgcaagaactccactgacatcactccaggtcctaggtttggctttttataagagcgaatttttagatgggttaaaaaacctttctcactagcaacctaaaaatagtaacaaaacacgagcctatatatgctaacagttcaattaatctgtgtgaacggtttggtcctacctgagggtagtgacgggatgccagaccatatgactatgatcgccgagctaggatatggtgtggcgctaagggtttacactatcagagttcttaatgtctcaatcttctaaagttaatgtcttatatcttaatagcaatactgtagcgaggtcatacgctgtgggtcaagttttttttactgtcatctttcaaacatgctgtatcatagaaaccgaagatcacaaatactaaggtgctgtttagatggctcatttcatgacgtgatctaatcataggctaattgattgtgttgtttgttctacggaccatgcaagtggatggcacgagaatgataagagtcttagcattgccccgcaacctttagtgactgaaccaaataaaactatttttttatgttctaaattataattgctttaattattttggtgtattcatgcatatcaaattaggtgtataaaaaactacttataatttataacggagctgagttaaaagtcctgtttggttccaccaactaaattttagttagctaaactttagtcactttagtagctaatgttctaaacacattgactaaaagtagttaaaatagtttagtttcattagtcaccccagagtagctaaaataattttagctagctaaaatttagttggtggaagggccaaagtctttttcattgcggcggcggaacttatctgactgttaaagttgcatttttacccaaagaaaacacctatactgatcaaacggctctccgagcgggacggaaaagcccgcaaacggcacatcccatcacggccgttatcaagtgacggccccccgggccctcgccctatccaaccaaatccgcgacagactgctcccctccacggaccacgcggctccaccgcctcccacttcacacccccaccggccaccaccagtccaccacctcgcctcgctcctcgctccggtgtccacacacgcgagcgcactactccccttccacgctcctctcgctcttcatgtccgccgcttccaccgccacggccacccgcctcatcctcccgcgcccttcagtcccgttccgctccctcctcctttcccgccgccggggccgcctccgccgcgcgttccacgccagcgccgtcgccgctggcggcggcggaggaggcagcggggccggcgagggcgccgcgaaggagccgccgcggacgctgttccccggcgggttcaagcggccggagatccaggtgccggcgctcgtcctgcgcgtcggcgccgaggaggcgctgcggtgcggggatgaggtggccgccgccgtgtcccggggcgtggggatcgtcgtgctcgaggccggagaggagggcggtgggcgagcgtacgaggccgctcgcgcgctcagggccacggtcggggaccgcgcgtacctgctgatcgcggagcgcgtcgacgtcgcgtccgcagtcggggcgagcggcgtcgtgctcgctgacgatggttggtgactgaatttctccttagcttccagtttgtatgagcttgtgtttggttggtagcagtcgctattactgttctggagcttacattttgcaatagcccggctcatgcttcagttgctgatcgttcatgggtgcctatcattcattcagagtttctttcagccttttttagaagttctgaatataatgccaatgatttgaaatggaacattggatatgttctgtcattaactcgtaaagcgtgctttgttttctaagtggtaactgtctgcaacattcatgtatttaagatgttattttgatgcaggcattcctgctattgttgcaaggagtatgatgatgaaatcaaatgctgactccatatatctccctattgttgctagaaggatacaatctgcaaactctgcaataagcgcttcaagttctgaaggggctgattttctgattgtaaatactggcactggtgattttacggatcttatgaatggtggtgttggtcaacatgtgaagattccgattttcttcacactgaatcatttgagtgaaggaacttattctgacttcacatccaggttgctccaatctggtgcatctggagttgttacatccttagctggtatgcaacttctcactgatgatcttataaaaaagtacttctcaaaagtggactcagctgaggaagtcccacgagcgagttactcttctgctgggatgctggaagatgttaataatgtaatggtcctaactcgcgatcgcgagaagactaaagttgctggatttacaaaattggatgaaaaagtgatgcagttgatagaaatagagaagcctattcttaatgaagctattgctattatccgcaaggcagcaccaatggtgatcatctaacgttacacatttggtagttgaagatgccctgaaatgaattcaattgttcttcatatcatcatcatctttagtatatctttgacttgaatgtaattgccgatttgtcatcacagatggaggaggttgagcttctagtggatgctgcttctcgcctgagtgagccatttttgttggttactgtggtaattttgggtttacatcgagtattgatttcagcaacgtccattacatagcttatattagataacctgcatgcataatactgaggcaaatgacattatacatgattattgtgttatattatataattcatcaaatgatgctatagggcagccatattaacatgtcttgcatctcctgcaaaagcaatcactaatcttagtatctgttcttttctcaaacaaggaataccagtgtgttatgaatattgctttgtgcatgtacttttgatttatgtgaacctatgaatctatcaaatcgatggattgaaatatttgttttcaatatcttacatttcatgaacttcccaattaatttgtgctatcatttagtgccttttctggttcattttgccatctatttctttacgtgttcaccttttgtatgggtggaaaaaaaattctcttctacgtgagttcttctgtagtccaccccttttaaagaaaatatgcttctgcatgtcctctttttgtttaaattttgtctgcatacatgtccacatgctagatggctctttatttgcataaacaaaaaaacaaaactctcctaagctaaccacatgagtagaagcacgagtcatgttctatagtagtataagcatacacattgggccttgtttagttcccaaaaattttgcaaaatttttcagattccccgtcacatcgaatctttagacgtatgcatggagtattaaatatagataaaaataaaaactaattgcacagtttggtcagaattgacgagacgaatcttttgagcctagttagtctatgattggataatatttgtcaaatacaaacgaaattgctacagtattcattttgccaaaaattttggaactaaacaaggccttggtcatgtttattttcctaacatatcatgtttattttcctaacatactcagtttggtatgagcccgtaagcaagaggattctcttattcactaggaatataattttttttctcgaaagataccagggtgaggctaaaacagccatacctgaacacacacaccccacatacccggatgcttacaaaaacacgctccgctgacataaaggatatcataaccaaggggatcagtctaccaaccaaaacctaaggttctggggcaaacaaccttatgattaaatcatgctatgcaccataaactgcaatcacaagacactgttttcaggaggccctaaatgcttggcgaaattccctcaaaacacacaggcattcctgtgtttccgctttttattaatataatgatacacagcactcccgcgtgtttggaaagaaagcattcctatgtttccatacttcccaggccactaaaatgatgagagaattcagccccttctgcatctccttgggaacatctctgatagtgtttccccaccatctaaagaagcgagttgcatcaactgaaggcaccactaggaatataaattggctgcttgttcttcattatattatacatattccacactttgcaactattttttttttcaccaagtactcattttaccactcattctgagcaaatcctcctgcaatttatcccagggtgaatttaactcaggaaagtcaacttttataaatgctttacttggaaggcagtatcttcaggagggagttgtgcctacgacaaatgagattacactactatcatattctgaggttgaatctgaaagctttgaacgatgtgagaggcatccagatggtcaattcatgtgctatttatctgttccaattttaaaggaagtaagtactgaattgcttttgactgtcatgttgatattactttatctcacagatgtatgcatccagtttattattctcaagttaaacaagctagtcttttccattaacttaatgcattaaattaaataagctagcttgatggatgtaatttccctttcacccagttgaacgttctttctgaacaaacttgaaatagtgataaattataaggagcagacttctttctccctccatgcgctgtatttgataaagtgtatcacctgcccattttctgtagctacctactacttggcttttgattaacatctattacatgtcccagggccaaatcagcagtgcattttcctttgcttctttactttattttgcttttcataagatgctccacgtttactaattcacagatgaatctagttgatacacctggaacaaatgttattcttcagaggcagcaacgactcactgaagaatacgtgccacgagctgatttgatactctttgtcctatcatcagatagaccattaactgaaagtgaggtatacttttttttactattttataagccaaacacatttgatattatgattttatcagcacataaataaacttgcacagtaaaattgatttaattagattgttttttatctgttaattagattggtttagttaaatctaatattgagttggtcattttgattccatctaaagagcagacttaagattgtaaatttgtaatacacttgaggacataattgtaagtgtaaattccgttccagtaccggttggaacagtccgtggaatgccttgtaccactgcccagactggaacataataggtgctatcctgtaccaatcacagttctagctgattccccccattccggatgaaatcgaacattccatggatcttgataccagttattcgaggatggatgctttgaggtcaccatcggatggcagccaggtgtgttccagctggaacttctgcgttgctacgctgtcgctccagtgtggtggtgcaatgaaaaggtgctgcatgtagaaatgagcttctgcttcccagtggaggaggagctccgataggtgtacctcaacttcttattgcgagcagcttcactgcgcggcccatgacggtgaggaccatcttctacaaaagttcaggaggaaagataaggcaggagaaaatgtgtttgtttctgatattatttcagccggtggaagtggaagagataaggagagagacaaaggacagtaaatagctacttttcttttttagaagggcagtaggtgttagcttcagtgctgtacatttgcacttgtcctcgattcattgcccatgagttcagatcgagcaccgtccggcgttgatccatcatcctcgggcgcagattgggtgctgctgggcttcgattcattctcccctgagctactgactttgcgcccctccgcatctgcgagcctgctacgggcatctgctctgaccaacaccagatctgtgcctctccgagacacccatgcctgtggccaccgtgcttccccagcgagcccacgtgccctgtgccccgtctacctccagatgtgccgccagtgcaagtggttgcctcttgtgctgctctgcaggagctgttaggccaccatggcttcgttttcttcagtttgggctgatgggtcacgtgggctggagcttgtactgtcatcagtgcagtgctgtttcttctattctcagcttgctaggccatctttgctatttggcctgctgtttggaaaatgcaatgttgctgcatgctgctagtgttacagagtcatgcggctgctgcatctatccatgtccgctgcacttgctctccaaaagtcatctgcaccatccaactccacagaaatatttgttaaatagccaaatatttcttttcttttgtggttggctgtttcgtttttggctaatcatttttatgtcgttgtcgatgcgactctctttgtggtggacctcatccagatctgtgtggcaatagttcgtctgcctgaaccttactactccttgttgccaaagttttgctaggcgctaggcgaaatctaggcgatgacccttagcctagcgactagtccagcctaggctagcctacgcgatgctaggcgctttgccaatttatatataaatatataaaatatacatttatagcttcagatttcagagcaatttcagattcagcaggaaagggcacagaggatagaagcagggaaaggaaacagaggagaggagcaggggagaacatacatacattcgtccttggtccttggagcagaggagtacgagagaagcaggcggggatgagcttcgccggagggagctgcttccctgcgggcggggcggtgtagcagggaggtggaggtcggagcggcgaggaggacgtgctcaaatttggatgtttcatttatcttagtgttgtaatgtgtctaagtttagtgcttagtgttcttactcttccaaatccaactccacaccttgcgtttgagaggggagggggatgttaagggtattatagtctgtttaggggtttgagtgatgtactatattttgctccatggcggctgtgcaatacagctagccattcatccattcctcctctcatctcattctaacgcattacaccggtatcgtccgataccaaaacatccagttaaacaaaccggaatggtattcacaagcttgcttgagtttgttggattcaagtttcaattggttgcttccctttctattttcgggtgcgaatgcaatttttgagttgtgtggggttgtgtacttgtgtggcgtgtgttgtagggatctagctcctttctttcttcttaatataatgaagcgcaactctcctgcgttttcgagaaaaaaaaagtttcaattgacacccttgaacatttcaaaacttcagacttccagttgatgtgagtctagagagaagttctagcaagatgtactctatgttacaactctatccaaatctagaaagaaataaatgccttttagtttgctgcttttggcgggcttagtttatacttcactatggccttgtttagttcaccccaaaaaccaaaaacttttcaagattccctgtcacatcgaatcttgcggcacatgcatagagcattaaatatagatgacaacaaaaactaattgcacaatttgtctgtaaatcgcgagacgaatcttttaagcctagttactccatggttggacaatgtttgtcaaataaaaatgaaaatgctatagtgtcaaaatccaaaaaaaatttggatctaaacaaggcccatgagcctcttgaagaatgggctagcgactcataggcagtggtgtggttaagggaatggaatgagaccatctgagccatagcgaacgcgagccttcatagggtgattgtcactgcttatggacctgaacctgggtcactgtatgaagggctctgaaggagaatgtaaatgatggaatatttaatatattgcattgggcctcatgggctgattatataaggtacataggactaacagcttatgtgggtacacaatgtggtactattcctatttactctaacatccccctgcaggcacaacgggagcgctatagactgtaagattggagaagaagctgataagtaacatcccctccgcagtcataacagtcgatgcaccacgtaagctgtggctagagaagaagccgatgagtcatcatgcaaggtgatagccctttgtgcagatgtcgaggtagccgagcgtaagggtgtagtagcctggtcgaagaagtcgtgctaaagatggccgagatcgatatagttgtgatcaggttgcatgtcgatggagctgcaggcacacaaggggtgccatggtaatgatggagacgcgtcgaggcagtcgtcgtgggagggggcgatgccgaagtcgatgcaatcaggaccgttgtagaagaaaggcgacgacgcagtcgaggcagacggggtaggaacgggagggtcgatgccgaagtcaatgcagtcaagccgcctgagcatcgaggcgcagctagatttgccagatccagcaacgcgttggggacgaaagcacgcgtcaatgttgccaataccaaccgtacaagggagagggccccaaccacacaaccgtacaagggagagggccccaaccgtgtggttgtgctggacgaagaagaagcaatgcgggagaagacgcgtcggcgagcaggtctcggcggcaacgcgggtcgtggcagctcgatgacaaagacccaatcagcaggacgaagaccttgtgcagacggatggcgcagcagggattgcgtagcatagtcgtcaatgcacaggtgacggcgatgtagatgtaacggcgaagtagacacacggacggtggtgctacggcccgatcaggcgacacaacagcagccctgaaatgcgcgtagtactcggagacggtgtcgatgaagttgatgccgatgccggagtagaatgcgcgaggtcgatgggcggtgggcgactcaatcccgatcagtgatcgggcaaaaccaaaaagatacagcagtagcagatcgagtgtacccagcaagatgacacgatggcggcggtgcgtcccaatcgggcggcgcaaggcgcacgacgggtcacgaacacgcggggtcgaaggcgccaacgcagatcaacgaggtggagatgggtagatccgcccgacaacaacgacacgccagatctggttgcctccatggcaacgcagggttgaggcgtgtggccggccttggccgccaccacggcggcatgggacgaggcgagatccatctgcctccatgcgatgaagatcaggtgttgatggcaacagccggcggcgagcccggggacgaggcggcggcggcaacctggcgatgacgtaggggagatcccgatctgctctgcgacgacgacgacggcagccggatcaataggatcgggcgcctaaagaggggcgctgcccccggcggagatcgacctctccccgggggcgtgcagtgcggaagcggcggcggctagggttagaatctaaacctaggcaaatgataccatgaaggagaatataaatggtggaatatttgatatattgcattgggctgattatatagggtacataggactaacaccttatgtgggtacacaatgtggtactgttcctatttactctaacaggctctcattgctattccacttagaaactcaaatttaatttgaactgctatctgtgacaattataacagattaaatgcactgccttttcaattcatggaattttcagtgacttatttctaggtttctttctataatataggttgcattttgtattatctttacgtggattccttctgagtcacatatttcatggtctctataatctggagttctaatttatgtttggacaatgtatttttttctattttctaatagtgctaaacgtggttcgttgtaacctctaggttggatttcttcagtatgtccagcagtggaagaagaaagttgtatttgttctaaacaaattggacctctatcggaacagcaatgaggtttggtgttgtaacttcatttctgcacaattcaaatgaaagcaagatttattttgttcctaattgcttgtttctaatttattgctttgcttctcaatctgatgtgtatagcttgaagaagctactgcatttgtcaaggaaaatgcaatgaaattgcttaacgcggaagatgtcacactgtttcctgtatcttcacgctctgctctggaagccaagctttcatattccaaaaacagtgacggaaagcatttgagggaagctatgtttagtgatcctagatggagaagcagcaatttttgtgaacttgaggattacttactgagtttcttagatagttcaacagaaaatggaaaagaaagggtccggctgaaacttgaaacaccaataggcattgcagatcgattgttaacttcatgtcaaagactcgtgaaactagaatatgaaaaggctgttgaagatttaacatccatcaaggatcttgtttatggtgcaaacaattatgccatcaaacttaagtctgatagcaattcctggcagaaccagatttcatctcttgtaggtgtttcaaatactaccagttattttttttatttacacaaatgtactccctcttttaccaaaatataaattgtatttctcctgccctcaatgcaaaatagtggttaaatgcaacttgggatactgcctatttttcttccttgtaatacctctgacccaaatacaaatctagcctgcttcagtgcaccaaatataataaatccataacaacctccttgtctaccttagatgcacactaaccaatggagtaaacttgacagttgccacccatcttaactccagtaatgattgatgagtactatggtcattgtgccctctcaccttaatacttgtgccaggtccagacggacttatatttgggatcgttggtagtactttatatttctggcctcaacatgtataataaacagttagtgcccacactatactttccaggggcacttatgaggatattttttgtcattttcgacatgccttccccattaacttctgatcttttaagtgtgcatatggttagatatacactttccaatttctcatacatgcatatattgctgacctagcaactagcattgatatttggtgacagtccttttgagtgcaatatgcttaatactcccagattgagaggttggtaacatacttacatctaccttcttgcagattgagagagcaaaaggtcgagcagtaacacttatgggatctacacttcagctgtcaaatattgaccttatttttacatacacggtcaaaggaaaaacaggcagttccacgagagccacatcatttgttcagaatgatattctgagtccaacccttgacgatgctgtggtatgtttggcattgaactttctcttagttttaccatattctgatccacatatgcttgtaagcatataattcacacctgagtgctaaatgtgcagcaatcccagaacagattgtttttccataattttgagtattgcattatggtatcactaactatgcacactataactattttggacaaactgttcttggaagtgatcccaagttaattgcttgcagttgccttgatttcaacaaatcttcctttatcaaaacttttggtgctgacttgcttgattaattctgcaattcgctgattatctcctgcaatatcatatgctttacaaggtggtgttggtgtgtgttgtaagggcttctgccctctcatcatccgggcagtctgcagacccaacttcgtcttttcgatgttcctttaatagaactgggattttcaggtgtatgtagtaagcagtcttgaacatggtagtagtaagcaattacatgggcacctcatatcggatctaaatcgtttgagcaattcatttaagagtaattcactttgcccatttgcagcatggttaatattttatagctctcagaatgagtacttctcttttttgatgtattattgtgttattttttatttatttttttgcacattctgttctaaagtaaattttatggaactatacatgatttatatcatcagaaaactatacttttgtcaactcatttcgcacgactttgctaatatatcacaaaactacacttttttttgtaacatagtgcgtgtatcaactgacatcctggacccccacacgtgagacacacacaggtggagctcattaatcatccaagcagatgatatcttacatatgggactgagatgtcatttaatgtccaaacaaacggaattagtgaaaagatgtgcagttcttttcagttgactaaagtatgagtaattatgtgataatagagatcgcataaatatatttgtctgaaatttgctcgatattctagctatttgctttgtcatgcttatgtatccattttatcagcaaaagtttttcttttgttagaatttactaggtgactactcgacatggttgagttctagcaatacccgtgaagcaaaagtatatttggagtgtttcagtgcaagatgggatgcactggttggtccagaagaaagggctctgttagatccaaatggacttgtcaatgaaggggagaaactcaccataaaggcactggatggcttcaacgccagtgctgctgccaaggtttttgaagaggaaatcagagaagtggtatgccttattaatggccttgatttatgtctattgatatgttttaaatctatgctttgacacccctaaaaagtattgaggttcttttttttttttgcgaaagaataagtattgaggttctaattacaagtagtacaccacactgttagggaaactgtggacatttcattatatatactaaatggtaaatgccttgataataggccaagaacagccctgaaatctgcagttttccattgcccttgtcaatctgttacatgaatatttattaggtggtcaagcttactgcttatacctttctagatgatgaactaattgtgccctgaagaactgaacttagtagaatccattgcatggtccaccgcctgtaatttgatcgtatgtcgaacatttgaacacacacctttagggtttgtttggacaaacgcattccctgtggattggagtggacctggcgggattgaggggaaaattagttcatttccctcttcaatccacatgttggaagggactggcaatgataaatggaaagaaattatttcatttgcctcttcaatccggaaataatatacatgcgttgggaattggaatgcaagaatagccaaagcattcagggctccacaatattttaggtttaacagaatacaatattttaagttttgtactatatctgagtgcagagtgcatgcctagacttgtaatcacggatgctttgtttgtccttgttttcgtgcattgttatttatttctgagcttagctatttgcatgtgaaggcttttggaacatttggagggctaggtattgctggactgtcagcttctcttttgacatctgttttgtcaactactcttgaagatcttcttgctcttgcgctttgctcagctggcgggtaattcaatcattgataactgtgcatcattctttagcaaagcttttaacaatgaaatgggacggttgatgtgtaacgattttgatttgtcctttaggttttttgttttatcaagtttccctggtcgacggaagcttgcaatacagaaggttaacaaggctgccgatgaactctcgagaaaagttgatgaagctatccaaaaggatatctcacagagtgctaatgacctaatccgctttgttgaggtcatcagcaaaccttaccaggaagcatgccagcgaaaaatagattggttacagggcgttcagggtgagctatctgctgtcgagcgtaagctccaaactttgaaagttgaaatccaaaatcttcatggatcgtgaggtctcattacaccttgtttatttgcaattaattctttggatggacatactaatcattttttgttggtttatactgcatcgtgatgtagacgtagtgcctttgctgtatatgatagtctgcaagtgtaatgtgcgttgtaaattcagaacaagtgataaactggatatccaactgtcacgtgataattgctcgccctgagaactgagaaggatgttttaaaaaacttgcctatttgataaaatttacaacatgtcaacatcatgtatcaaaacatatgaaacttgcccttttgggatcaagtgaaaatttaaaaataaaagttgctttcaaatctagatctgtcacgcgtaatgcaccctataattatggcgtgccgggtcttgcgttagattcatatgtacagacccagatggtggccttctacgtgagagtgcctgacctctcgtccacgtcccctagagccatagaggtatttgccgtgagagtaccagacggcctcactcttctatttatattgttacattacatggtgatcatacaaggtaggcaataaatcatacaatcaatcagccataatcctggcaattgctagcttatgcacgaagctttgagcttcgcctgggctctattcgagtgctggtccgctgctgctgctgggtacacactacacacaccaaggcctctccaatgagaggagagttttgcaagaatttgactagctgtgtggtgaccacaaagtgagctaaatccttggcctttctgttagtgcgttg

SEQ ID NO: 4934 - DNA, 6998 bp, Sorghum bicolor
gtatatagacagcatacatctaagtgcataataaaaacagtttcaaaaaaaagtgcataataaaaattatgtacctaaaaagtcaaaatgacttgggttttttaattcatattttttgctatgtatgtagatataacatgtatgacccataataaaagttatgtgccgaaaaaataacttataatttggaatagaaggagtaattgttagcttgatatagtgtccatgagttctttgtcctgacttaggatgtgtttggtagagatctagattctgaatatggattttctcaagaaacattttaggagataaatcagaattattttatgaaactgtttggctagtaggatgaattatgatttgtaagatttttttacacaaaaattacaaataaaaaaatgttccagaaaatctattttttgctagacaaagaacaatttaaatacaacccattttaatttgttacatcagaaaagaattgtaactaaaaattaaaattgatagcatgtacgggaggcataaaaaagtagaaaaaatctacataactcctaaactatctaggataaaatacttcatcccaaaactataaaccggatattctacccctgaactttcaaaactagtcaaataaccccctcgagtggttttagagggtgatttttctctttttctgttttatttatttctgctaaacttttgaaaaatcataataaatcacaaaaaaattataaaataaaaaattcaattttattggacttctgataagtagatctacacaatgaatatataatatggtatactttagtacaaagttttttgttgtagctttaaatatatgttttctataattaattcaaataattcatatatgtagttcctatggtccaattacggtaaattttttatggtgggctcattattgtatgcttaaactatggtaaaaatttcatacttattggatcatgtataacttagttatagataaagcatagatttaacatgaataaagacaaataaatctataattaagttatacgtaatccaatgggtatgaaacttttactatagttcaagcatacaataatgagcccaccataaaaattttactataattgaatcttatgaactacatatatgaattattattattaattatagaaaaacatagatttaaagttacaacaaaaactttatactaaaatataccatattatatattcattatgtagatctactcattcaaagtccaacaaaattgaattttttattttatgatttttctatgattttttaaatattcagtaaaaataaataaaaaaagacaaaccaccgtctaaaaccactttaggggttatttgaccggttttgaggtcagaaggtagaatatctagttttatagttttgagataaaatattccaccatagtttaaaggattatgtagtctttgtttatataaaaaaaatagaccagaatcgccgcgaagctacccggtagccaatcgggatccaaggagtagaatcgcttcgaagctgccctctaggcaatcgtgagaaacattcctctcccatttcgtttgatttgatgtcgtttctcgtgattctcgggacacaaaaattctcgtgaaatagggttgcagtctcgtggtacatcgtcatcttgcaaaatttagtgttaatcaaggcccggtgtaaacagcaaaattcctcccactaccactatgacggtccagagaaaaattatccagcagattgagtaggatttcttacctaattctgctcataatcaagcgtatccactatggccgactgacaaattggttatatttaaatttaaacagaaaaaaaaaaatccagtccacacggctacggctcccccgcaacgtccgcctccacggctgacggctccacaccaccccaccgcaagggcgcggcctctccaacggtcatttcagccaaaccccaaccccaaccccaacggatcggtccaattcaaaactcgaatcctgcgctccttccccaaacccctcccggccccgcgtctcattctcatcctcgccagcctccccgaccccccagatcaacgagatccggcgagcgaatccccctcttccccgaccaccatatcgcagcgatggagccggatccggtcaccgcggcgggggcatcctcctcctcgccgccgccgccgccgccttccgaccaccagatcgcagcaatggagccggatccggtcgccgcgggggcatcctcctcctcgccgccgccctccgaccaccagctcgcagcgatgaagccggatccggtcgccgtgggggcatcctcctcggcgccgccctcaccagcgccggccacgtcgtccccgccgtcctcaccagcgccggccgcgtccccgccgcggaaaacgcgaggtactgtttcttagttctcaggctaggagtagggttcctttattattggggagtacccggttggcgtggcgtgcgtctcttcgcctcacacggcctggtgtttggttgccagatgacgatgggcgggaagcagtggagtgcgcggatcctgggggagacctgaaccccgcgccgccgctgtcgcctcagcaggctacaggttcgttctcttcgtctagacgtacgctagcaggagatggccagtagggtttgctttgtccgtctcacggtggggaaattgttcgcagttgaggacgccacggtgggcagcgatgtcgcgcaggaggaggaggcaaagaaggaggcgatggcaggagcaggggaggctctccgcagcttcatggaggtgagagctcctttggatgccaattcgtggctgtcgcgattttgaattctcaagattcctgctcgtgcttattatagattcacaaatatctgacatatcagagaaattgaattagaaaaatcttgaaggccatgaaaccgagcagcaaaatgttgatttcttttttctccattcgcaattatggctgaactttgtttcaagagcaaagatgatagggctgttcgcttctgattacactgtgccttttcttcaggagtttgggaatcaaggagaggactctattatcttgtcaccacggctgaaggagattagtactcctgaccgcccagctgccatccgctttctaggtacacactactgtcatacacatgctttgcttaagtatttgaaacattcctatagttatttgtggtatttggtctttgtttgtgtgtaggggagaagtataacaacctcatggagaggtacaagaaggcggtggtcaagtgttctgaggactgtgagcccagatataatggcctgaagaagaagtacacagatgagtgtgccgagaggcggcgtctgtacaatgagcttattgagctaagaggtaacattagggtgttctgcagatgcagacctctgagctccgatgaggtcacccgtgggtgtgtatcagtggttgagattgacccgtcacaggagaccgagctgcagtttgtccctaatgaaaaagaaaggaagccgtataagttcgaccatgttttcggcccagaggatgaccaaggtatatttaactgaaactgtacctagctgacttgtcaaatatgctattagtatgcatgtttcagtttgatggatttaaccgatcatattccaacctttttgtgcagaggcggtcttttcagaaacagtgcctgttgttagatcagtgatggatggtttcaacgtttgcatctttgcatatgggcaaacaggaacggggaaaactttcacaatggaagggattccagaaaataggggtgtaaattatagggctttggaagaactgttcagaatttcagagaaaagaagtgcatctgttacatacacattttctgtaagcatcttggaagtttacaacgaaaagatcagagatcttcttgatgagagcaatgatcaatcaaaaaggtacaattccttcctttctccttttggcgagaaaagatacattgcttaaacatgttatcttgttgcaattcaaggttggatattaagcaaaatgctgatggaacacaagaagttcatggtttagttgaggctccagtttataacatagatggtgtttgggagaaactgaagtttggtgctcaaaatagatctgttggctcaaccaatgctaatgaactcagcagccgctcccacaggtgagggctttggtgtttcaccttgtgtgttatttattcgttctaattaattaaaatcataatctatgatatacttccattttgtaagattgatcacctatcgtttagattaagtttttgtcaattatcatttctatttgcagtttggttagggtcactgttaggagcgagaatttggtgacttatcagacgagcagaagccacatgtggctagttgatcttgctggaagtgagagaatagctaaaactggggtagaaggagataggctgaaagaatcacagttcatcaacaaatcactatctgccttgggtgatgttatatctgcccttgcctcaaaaaattcccatattccatacaggttagtcctatttacatactaaggtatctactttgcttagctgctttaaactatcttggtcttaccacctccaattcctttttttctgtcaactaggaattccaagttgactcatttgctccaaagctctttaggtaagttttctccttgtactacttatgtggcaattacactgttctttttatctaactgatgaagtttcatatcctattgatttgatttcattagtgtactagaatgtaccaaaaaatgacaaggtgatgaacttgctcattcaacatttttacaggcggagattgcaagacactaatgtttgtgcagataagtccaagctctatggattcaggagaaactctcagttcactcaattttgcgagtagagtccggtctgtagaacatggccctgctcgtaagcaagttgatccagctgaaactttaaagttcaagcagatggtaattttgactcccgaatcacactgaatagctatgacaatatagtttggttatattataactatataaaatctatttcagactgaaaaactacggcacgaggaaaaggaaaatgcacagctgaatcaacgcttgcagctgatgcagctcaagcatgcttctcgtgagaatgtcttcaggacactaaatgaaaaggtatttcctcgagtctcgttgtattgatttggttggatcctactggatacctactgtcatggaatcaaatgttaacacaaaaacacaaaaaatgttttgcaacaggtgaaggatgctgaacaagcatgcagaaattatcagcaacgggtaagtaataggagtcagttatttctagttcctaaagactggtcccctctgtgtattctaacctgtactcatgaaatgtactcctctgtacagattagagagctggaaaatgaattaggtaatgtgaagagggcttctagggattctgctagatcctcgaggccgccacttgttccaacgaggcagagacaacctcagggaaggaataacagcttggtaccaccttcaggcccttctagatggaggctcaaagctgccacaattaacaacaaagagaacattcctgtggcgatgaataaaccaaatcctgtggatgatcctaaggctgttggcaaagcaaggcgcgtttcacttaccccggtgatgcgacatgtcctccccatccagcccaagaggcgatcatccatcgcaatactgccttgtgtgaaggagcatttttctgtgctaaacgagaagagaggaggatctggactgccaagaggatcagttgccacacttggtgtgaatttggttccaggaacacccctagcaggacgtggtggacctgtttatgctaccccagatggatcaaagttcaagagatttgatttcggaagcagcagcaagttcacaagccctccaaatgtgggcatgtggaacaaaatggtcacaccgcagcagaagcttggaatggcaccggcaggaggtcctgcaaacgcagcgaagttgtgcttcagcatccagaaaagagttacgcctccacgtgttcgggcaacttctggtttgggcatcagcattgtcgacgcagctctgcgagagaacgtggctgtggggatacacgccaaagcgcggcgggtgcccaacccaagagaagacaatctatcctctaactctggaagcgaaggtttggacgttcaaactgagctgctgtgtggtgagaatgatggtgccttaagcgtcgtgttcttagtgaaaccgtgttgggacagaacgatgttcttttcagcatctttaaagtgattctgcttagttctttctagttgataagaaagctatgttaaaactgttcatggaagtcgttgattgtatttgttcgttactaagaaagctatatgttaacatcggtcttggaagtcgttgattgtatttgttcgttaccaagaaagctatgttaaaattgatcgtggaagtcgttgattgtatttgttcattactaagaatcgcttgctttacaactcttgtgcaattttaaatcatattcacggaacacccagattctgccacgaacaggtctggcaatcacattcgtgatgatttcaaattaaacagcgtggccagactccagtcaaactcaaattcactacggaaaaatttgaacagccctactaaccagaacaattgaacttcttaaatgtcaaataaaagaattatcagtccttggtcccacacactttttcaaaactattctgtcaaatcagatttaccagctacaaccatggacagcctgactgctgtacctttcccgcacgagctcgtgtttgcaagtctcatcggcactgctgttacaaatcaggtgtttagtcacgttggctgcttggacctgaattggtctctccaaaacaagaaccagagcttccttctccaactgcaagcagtagcttccaaaagtctctatatccactttgag

SEQ ID NO: 4935 - DNA, 2941 bp, Sorghum bicolor
ctaactgatgaagtttcatatcctattgatttgatttcattagtgtactagaatgtaccaaaaaatgacaaggtgatgaacttgctcattcaacatttttacaggcggagattgcaagacactaatgtttgtgcagataagtccaagctctatggattcaggagaaactctcagttcactcaattttgcgagtagagtccggtctgtagaacatggccctgctcgtaagcaagttgatccagctgaaactttaaagttcaagcagatggtaattttgactcccgaatcacactgaatagctatgacaatatagtttggttatattataactatataaaatctatttcagactgaaaaactacggcacgaggaaaaggaaaatgcacagctgaatcaacgcttgcagctgatgcagctcaagcatgcttctcgtgagaatgtcttcaggacactaaatgaaaaggtatttcctcgagtctcgttgtattgatttggttggatcctactggatacctactgtcatggaatcaaatgttaacacaaaaacacaaaaaatgttttgcaacaggtgaaggatgctgaacaagcatgcagaaattatcagcaacgggtaagtaataggagtcagttatttctagttcctaaagactggtcccctctgtgtattctaacctgtactcatgaaatgtactcctctgtacagattagagagctggaaaatgaattaggtaatgtgaagagggcttctagggattctgctagatcctcgaggccgccacttgttccaacgaggcagagacaacctcagggaaggaataacagcttggtaccaccttcaggcccttctagatggaggctcaaagctgccacaattaacaacaaagagaacattcctgtggcgatgaataaaccaaatcctgtggatgatcctaaggctgttggcaaagcaaggcgcgtttcacttaccccggtgatgcgacatgtcctccccatccagcccaagaggcgatcatccatcgcaatactgccttgtgtgaaggagcatttttctgtgctaaacgagaagagaggaggatctggactgccaagaggatcagttgccacacttggtgtgaatttggttccaggaacacccctagcaggacgtggtggacctgtttatgctaccccagatggatcaaagttcaagagatttgatttcggaagcagcagcaagttcacaagccctccaaatgtgggcatgtggaacaaaatggtcacaccgcagcagaagcttggaatggcaccggcaggaggtcctgcaaacgcagcgaagttgtgcttcagcatccagaaaagagttacgcctccacgtgttcgggcaacttctggtttgggcatcagcattgtcgacgcagctctgcgagagaacgtggctgtggggatacacgccaaagcgcggcgggtgcccaacccaagagaagacaatctatcctctaactctggaagcgaaggtttggacgttcaaactgagctgctgtgtggtgagaatgatggtgccttaagcgtcgtgttcttagtgaaaccgtgttgggacagaacgatgttcttttcagcatctttaaagtgattctgcttagttctttctagttgataagaaagctatgttaaaactgttcatggaagtcgttgattgtatttgttcgttactaagaaagctatatgttaacatcggtcttggaagtcgttgattgtatttgttcgttaccaagaaagctatgttaaaattgatcgtggaagtcgttgattgtatttgttcattactaagaatcgcttgctttacaactcttgtgcaattttaaatcatattcacggaacacccagattctgccacgaacaggtctggcaatcacattcgtgatgatttcaaattaaacagcgtggccagactccagtcaaactcaaattcactacggaaaaatttgaacagccctactaaccagaacaattgaacttcttaaatgtcaaataaaagaattatcagtccttggtcccacacactttttcaaaactattctgtcaaatcagatttaccagctacaaccatggacagcctgactgctgtacctttcccgcacgagctcgtgtttgcaagtctcatcggcactgctgttacaaatcaggtgtttagtcacgttggctgcttggacctgaattggtctctccaaaacaagaaccagagcttccttctccaactgcaagcagtagcttccaaaagtctctatatccactttgagcctgaagtccagactgaacaacaaatccagttcaagcatattcatctctcttgtggtaattcctccaactctcccgtagtatgcattgttgaaaaaactgcaaacaaaatgtatccagaaaagttactggaaaactttcttcagtttattttcactatggaataaacaaaaccttgatcaatatcagctttcttttatttgaactgtggttataagtttattttccacagtcagggtggaattcacttaataatctggggcatattggccatcaacacctgcccctttatcttcacctttccttaaattccaccataggcctatcgcctgttacaactaattgactgatgcattcctattaactagtgctttaacaaaaaaatgtactgaagacctgaatgcacaaacagcctaacagtctagcatttagagataaagtggcttcttatttcttactccatatataatataaagaaggcaaattgcttaaataccctagaagatagctggccacaaaccatgtaaagttgttctggatgataagagatcatatttggacatttcctagtgatgctagtttattgactctaaggttgagtttgcatctgcggtcagtatcattactgaagacctgatatcagtctatggctaacagcctaacagta

SEQ ID NO: 4936 - DNA, 3227 bp, Sorghum bicolor
cctggagcaaaacgaggcggtgagtttgcagtttcagctggctggttaatttggtctggcttcaactttgactagcacttctgccaatcagctcttggctggtggtgtgactagtggtgtccaatacctgatgcatgtgaaattcgttcattctgtggttgcagatcgaccacatggtgaagattttcccgagagttccccatggtttcgcctgcagatacaactccagtgacccgttcgccgtgaagaccgcggaggaagctcgagaggacatggccagctggttcaccaagcatctgaagcatgagagtgagagcttccagttccagagagctgcagggatctaggaagcatctacagctaggaagaacacgcctctctgcagtagctctgcctctctctcatctcatggaatcttgtagtggtactaaaaggagtactccctccatacctagaaagaaaaccgttttggacaaggtttgagtcaaacattgagaatataaattataaataattttaagttgttgaatcgaaaatgtgaaaaccatatgaatagatttatattaaaaaatactttcataaaataatatatacaaattttttaatgtataaaaacaaaaggttaaagttagaattcggagactataccgttgtcctaaacgacttccggagagaatagtagctagtctgaacactgaataaattacacgccatcgtcagctcagcttgcagtgttgtgttgtccagaggtgtatcaggtatcaagctccatcctcggttgttctcagtatttgagtggccagtctgatgattgaattataaaaaattgggcgcgcaaagagagtactgaaactggtcatttagaggtgaagctattgtggaaataaataattcatccattccaccctttgagctgctccattctgaggttgcgtgcagaaactatacgactgttaactgtccctcgagtgcatttgaaaatgaacgtagaagtttttgctttacgccttcacagtcgggttacagaaaaatataatatatggggaggattaacaaaaatacagccaaaaaagaggggcgcgaaggaaaaattccgttgccgggactcgaacccgggtctctcgggtgagagccgagtatcctaaccagctagactacaacggatagtgtgaaaagagtagaaaaacagttttattagtcggttacaaaagatggatttaagaataagctgaactcgtaataattcaatagatttgtcgcgtacaatgattgctattagaccagaatcagcaccaaagaagcaatattcagtgctcacagaacatcgatcgtgtgttccaatcaaattatcctagcattctgttcataacttgagagcctcaaacgataccgactttcttttttccctatctaagggggaaaagtcgattcgttgcagccttggagggactaatacataagttaagcgtttaaaatttgatgatgccccatgtatcatggtctcatggaggcatgcaagcattgggcttgggcttgggcttgggctaggctgctaccgagtaggctagtagccgtacctactacccatggatacgaatacgcgagaacaaggcagaccgaaacttacacctgttgtgcgtggatagccctgtttctgcggattggattgcagctggcggcgggcgaatctgcgatgcaccacctgcagcgggagacgagatgcgttccttgcacatagcaaaaaagcgacggacgtctccgctgcctttgctttgcctttcaacccacgaaacggcccaaatgctgctggcagcctcgtacttactcgtatcctttctctttccagcacgcacgaatcgggaggcgatatacatatatacgggccgcgctgatgcctacacgcaccgcaagaaccagagcgcaacagcggcactgtccccagcaaacttgccctcctcccgccggccggtccgcgagcgcgagcgagagccggcagcggcatggcgtccgccgcccaccggtccatggcgtccgccctcctgttcctcaacctcgtcatgtacgtcgtcatcgccgtcatcgccggctgggccatcaactacagcatcgacgagagcaggaactcgcgtaagtgacacactgtattttggttttcgacgtacgacgtcgccggccgcgcgcaagcaaatgttcatggcgcggcgagtgtaacagtagtagtgagtgactgcatgcgtgcgtgttggtgcagtgaagggcgcgaggccgccggtgcggctgttcccgatctacttcccgatcggcaacctggcgacggggttcttcgtcatcttcgcgctcctcacgggcgtcgtgggcatcgccacctcgctcgccggcctgcacgacgtcagccaggggtaccccgccagcatgatgtccgccgcggcgtcctccctcgtcacctggacgctcaccgtcctcgccatggggctcgcctgcaaggagatcagcctcagcgtcaggcccggcagcctggtaatcagatcatataattaatggcgcctacgaattgatccattgcagttagttcccttgcttgtgtaatgatgactacgaaattgctgtgcgcagcgcaccttggaggcgttcaccatcatcgcgacggcgacgcagctgctctgcgctgggtcgctccacgccggcgcgcacgcggtcatcctggagacgcctatcggcggagtttaactgaggcgagcgatgacgacgaacttgctgggaaaaaaatacatgcatgtgtcatcttggcagtgatgattaatatcggtgtgtgtgtgcgcgcgcgcgcgtgtgactgtgcgagcgcgatcgatgctatggcttcttcacacgtgccgtgtgtgtgtgcgcgctttctgggtaactaaattcgtgtgtttattattccttattcgtttgtaaatgttgtcgtggtcgcgtacgtataaagtggtgaactatcggcgattctttgcagactactgcgcgactcaaattattgcactttgcacctttccaaatactacagtatatacactgccaaagaaattaattctctatacgtggtttgtatttccggaatggatattcggacatgtttaatttagccatccgatgaaatctccgcaattttcgtgatcgtctgattttctcgctcaaaaatagttttggttcctctccaattaactctgaaaaccgttccttttaat

SEQ ID NO: 4937 - DNA, 18062 bp, Sorghum bicolor
tacattttggatttcggtatcaagaggcaaaaaacccaaaagagccttcactgcccccacctaaccttgaattttttagcattttagatggaactaaatataaccctgaaaaatttggcattttataattcatcattccaaaatagttgacattttgcattttgtattttatggggaactaaacagggtcaaaagatataaataaaaagccacttataatttagaatgtacatgcatctccaatagttcgaacccaatgttaatctttgtttttgatatattaaaaaaaatctctccaataacttctaattttaactcctaatctttgcacacttttttggtataagaaattcaatcgatacacgtagaaagataaaacatgggagcaactttctgatccaatcataaaaaagttgcgacttttgtgtcatgtctctttgtcactaccccttctatacactaggagactgaccattggggagctggttactggctctaccaccctaggaaaagtaaaatcgattggtgtcgccctgcttttgccctagccttctctttgcaagcctagccttttatagagtcctttggctactcctgcccaccatcgttcaactacaaagcaccactagcctagccttgtctaggccccgttgactgtggccctgtctgactatagctggttgtggctggttgaatggttgtaggttagtcactaatgactaggggtggctaccacttggttgtggcagttggaggatgtagagataagctagggtgcaggatccttcatgtgagaccgactcttttagtaacaagatattaaaaacggttggcaaaatcaaacaaatatgttcataacttaagttcaaaaactgactggtttattggagaggctcctagagtatttcgtaaatccactctctaaatcctctctacctttagcagcgagaattccataatagacaatggcaaaggaggcctaactcacatgtgtcattggcaggactttgcctgagctgctatgaccctcacctggcttccttgcgccacctccataaggcctacattaccatcccactaacaacaaccataagctgccacatattttagaaaaatatggcatttggtatggttgtatgaacggataaaaaaatgacatgatattacctgcataagcagatgcaacctatctatgagaatgaaatgtggggtccaccgtccttatcttgtatccatcagcttagtctcgggagaaaagctcaatttgagcgtgtaccacaagcctaattttatctataaatgtatgcaaccaactaaacatactattcattcagctttatacgactccataggtgcgcgatagatggagcagatcaaccaaatacccctttaggctccgatgctcatgtgagtataagcagggaactgtttgcttcatacttaagattgacaccgacgaatcttagagaaactttggatgccaaaaaaacacggcaaaacaaatttgaagcaagaagataaatttatgacatgtgagaaggggtgcaagaaagtatgacatatcatagttacagcaataaacttaaactaaacatagacttaaaaaaaaactgtagcacacctaacttatggcacgtagttaaccaaagaagtcctcatctagtacgtcaagaaattcgattacaaagtgaattggagcgtacgacacaatgatttgaatgtatttcgaaccctaaacatgcatcatgttttttttattgtatacatatgtatatatattaatttaaatttaaaataacagtgctattatatatatatatatatatactttagcatcttcttccaaacagttcagtttctctcgggtccacctttttttttttgcttggcacaaactttgcttaaattacgaaaggaaaacgaaaaggaaaagtctcgggagaattcagatcgtcgtggggattccacatcgtaaaaccactgaagacgaggccggaggaccagacggagagtagaaccacgcagcgaagcagcagcggcgacgaaagccctcgcgtcggtcgcggccgccgccccccatcgccggtcgccgctgccggtcgagtcccgtcgagccgaatcggtaaaccctcttcaaatctccacttgtctcacctctttggtccacatcaggacccgatctgagactctgggtagctccgcagcgctccccgatccgggtggccgcggcgccggcatggcgcggttcgaggtgaacggcaagtcggtgcaaggcgtggacctgctgtggcggcgccactgggcgtcgcgcctcgacttctggcccttccttgcgctctatgcgctctggctgctgctcgccgttccggcgctcgacttcaccgacgctctcatcgtccttgccgcgctctccgctgctcacatcctcgccttcctcttcacggcctggtccgtcgatttccgggcctttgtcgggtactccaaggcgagttccctctcaattcttaactcatataatctagtcagcattatccatatctgtttgaaccatttagattttagggctgaacggcttgagcttggtgatattgcaggtcaaggacatccgtgccgctaacgcgtgtaaggtgaccccggctaagttctcagggtcaaaggagattgtacccctgcatatacagagagttgtgagttcaaaatcctttttttttcccgagagcttgttgcgccttcagctctctttggggggttactgagtgtgttgttgagtgtttgttcaggtggcatcaacttcggctgcaggtgagacagaggagatttactttgatttccggaagcagaggttcatctactcggcggagaaagataactttttaaaacttcggtacccgacgaaggagttgatcggttattataccaagggcactggttatggaactgaggccaagattagcaccgctgtggataagtggggtagaaacgtgtaagctgcgtcgctgctcccctctctattttgtactgagctttcagttgttgagctacagaacttttaattgatagctgtataatccagaattgcgtagatcaaacacgagaaacacaaatgtagtttaagagggtaaggctgaacttaatttaaggttaatgtctaacaatgcacaattggatattaaaatttgctccatccagcactacctgaaggagattcacaattcaacttatggggaacgcactatgagagtggatgagtgttcctgatctgtgatgcatgtttattggacatgttatccaaaatagacttgtactataacaggtgattcaattgtggattagatttaaaagagtaggtgagtagctgaagggatttgtgcatacataacttgttgctatagtggattccctttgtacttaggggctgtttggatacaaggtctaattgctagctacctaaaaaatagcccaaatcagtgctattgaatccaaacaggagggctaatatgtgggctaattttttttggccaagtcttcaactagtttttagcaactagctagccaaccacagctaatttgggctaatttttagctccaactagtaactatccatgtgtatccaaacaagcccgtcgtctgatcacaaacccttgtcattttggacatacttgctatccaacttttggctataaatattctaagtgttcagattggactaccggatctgtgtagggaaaggatattagcaataattataattttggtttttggacatgtaatttgataccccctctgatcacaaatacttgacacgtttgactttacatggtcttcattgcgtatatttgaccatagtatattcttaaaatccttcaaatataagagattgacaagcattttgattacaaatgggcacatataacttagatgctaccaaataaaataatgtattactccctccattccaaattgtaagacattttggcttttactagatacatagcttttgctatgtacttagatatagactgtgtccaaaacgtcttacaatttggaaattggaatggataaggtatttattaatgtatctggtttaggtttgaccaattcttgtcctaaacgacatgttttttgtgaccggagttaatacattttagtgatcactgcattttggagaccatgctaccgtccaaaacgacatgtatttgtgaccactggtgggaggatgcagtaatatctgcaacatgcaacttctttaattccatattatgaatactaaatagaggaatatatgctgcagggatgatctattagtagaactaaagtaagagcatagtacgtgcctagggaatttcaattatggacagtgggcatgggtgcatctgaatctgtatgtcataaatcaaataaccaatgtactactgatttttgcatcaaattgaacaaaatagatatcttttaccatattaatctgtctagcaacagtgtctgacaatatttattgttctctccagattcgagtatccacagcccacatttcagaaattaatgaaggagcaaatcatggaaccattttttgttttccaggttactttcttttatctcgatacttactaaactcacttatatatgtttaatgagggcttctttatgcaggttttttgtgttgctctttggtgcctggatgagtattggtactacagtttgtttacacttttcatgcttttcctgtttgagtctactatggcaaagaataggctgaagacattgactgagctaagacgtgtgaaagttgatagccagattgtgttgacctatagatgtggaaagtatggatcctccattttatttaagttttttctgtttcagcatatatcccatcctaattgcgtgttctttgttcagatgggttaaaatccctggaactgaactactaccaggagatattgtgtcaatagggcgctcaactagtggtgaagatagatctgtaccagcagatatgctattgttagctgggtctgcaatagtaaatgaagctattcttacaggagaatctactccacagtggaaggttttcttttgttttcccttggatgtttttaattagaaaaaatagttccattgtgacagtttgtgctttcaatcctatattttaaaaaaacgcattccggttgccattctagtttgtcaattggaactgaagagtcatttactggactattacagtatgccattcttgtgttgcacattctgtttgaacccattacaatttacaacagtcaactatgcttaaatattaaacaaaaaactggctttacatgaaactactaaaatttgcaaccaagttaccagagggcatcgttccatagaaaaaccaagcttaaaattcagttcattttgtatagctattaatagttcaatcattatggctagaagtggaggaaattaacagtatgcttcaatagcatctgtgtttttgtcgtagccataactctatagactaacttccttgttcctattcttatgctgtaactgcataattatttgttttttcaaaggctctgactacatctactgataggtttcaattgctggacgtggtcctgaggatatgctatctataaagcgggataagaaccatatcctatttggtggcactaaagtattgcaacacactgcagataaggtagatacatctcctgagcttctgtgcccaattccgttgctgacgtgtttatttttatagtctgtaaatcttcgagcacctgatggtggctgtatagcttttgtattgaggactggatttgagactagccaagggaaattgatgaggactatcttattttcaactgagagggtaacatctgtttcttcagtaatgaaagtaaattatccaaagtcatgaaaatctgatgcctgcattttaatgaaaataacaggttactgcaaataacaaggaaagtggcctgtttatactctttttgctcttctttgcaattattgcatccggttatgtgcttatgaaggtaacaccagaaactacattatctatagagtgaaccattattttttatcctattctttagttcttttgcctcttgtcttctattgaactgttgttttatctgtgtatatagggactagaggacccaacaaggagtagatataaacttttattgagttgttcattgattattacttctgtgatacccccggaattgccaatggagctctccatagcagtcaacacatctttaattgcattggctcggcgtggtattttctgcacagagccattcagaataccgtttgctgggaaggttagtaaggaaaccttatgagtccatgtttctcctttcttttcaagctttttaagagttttctttgatcaggttgacatatgctgcttcgataagacagggactctgacatcagatgatatggtaagttatatgcttagtttatttccttattcgataagagggtgcgggggatgacaaacccttttgtttcaggaattccaaggtattgttactttggaaggcgatgatgacttaatatctgatgcaaataagctgcccctccgaactcaagaagtgctttctagttgccatgcattggtatttgtcgacaacaagctggtatgtcgtgtgcaattatctaataactaactgctttttagaaggtctgacgtataacctagtaactgtgaaaaagtttgatggtgtctttcatttcatcttaataaaggttggtgatcccctcgaaaaggctgctataaagggcatagactggatctacacatctgatgagaaggccatgtctaaaaggtaagctgtcatatgtattgacctgcataaatatgtaagcaagtgagcttatgattaagtcaacctgatgaaatcataaaattcaatgttattgttgtcaccaggaaagaataacttgggtggttattagttattactgcttttcccgctccattgcgagcataaggtattaaattgtatgtgttaattcatgttctcttttattgcaggcctggtggtcaacctgtacagatcgtgcacaggtaccattttgcttcccacttgaagagaatgtctgttatcgtccgtatccaggagaaattttacgctttcattaaggtaagaattctgagagatccaatgaaatttgggtcgacaagttgttactctgtccttgttaatatagggttactatttggggtagttcacacttcacagtctcttttggccttggatgtaaatgtgatcatagttgtaacataatgaaacatagtatttggtttgtaacacaatgaaacatagtattttctcttgttccaagacatctattccttggaggaaccaaatgatcttcatagggttttgatacattgaatatttaccgctggaggttggagcaaatcacaagacaattctctgtagtccataccattgctttgacagcagatatatcttctatgctccctaacattcatccacatgatctatttaaagttgaaagctgagttcatcttggtcatctgcagtttgagaaaatatttgaaaagtcttatctcaaattgtctgtgtactgtctattagcgtgactattttttgggtatacttattatctttttttcctgtatataaactaaatttgttcaatgaaatcgccatgggagccccactttctgtttctactaactaaaggaaatcattttctagaattttcccaaaacggcaatgtcaagtcttcagaaaaaagatgtcaataacattgggacctcagtgaactaatgatgcaaccaacgctccatttgaaactatggttggatcaatctacatttgagattcagtgatgctaaatgaccggctttctctctttgtatagactccctagcttagtttctttttcttccgtcttccttagacctgttgcttctttcggttttggtgtctgttgtttagttgtacaggcttgttctttttttcctctttttatttaataaatttttcttacagtgggggcttcccctgctgtattctcactaaaaaaaaagctgttattcagtagtcatgtgcagtatcttcctttctaccacaattaaaagggggaatattgtagctggcaaaaataaaagtaaaatcactatatctgttgagtttcataatttggaaaacaagaaggcataattttttttttcagtccataggaacttgtgagtcaaattgtttctctggttgatggtcctgtgagattacttctaattctttttccaagatcttgtttaatttgatcttatttttctagttatatccatgtgtcttatattttgtgatcttcagggtgcaccggagaccatccaagagagattagttgatttacctgctgcatatgtggagacatataagaaatacacacgacaaggttctcgggtcttggctcttgcatacaaattgcttcctgagatgcctgtaagtttctgttgatattaatcgtgtcatttgtctatagccattctcttctgttctgttattctgttgtcagtgtacttccataaaaatcctgtcagagcaaagcaaaaaacttcttgattctttgatgtgaagggacctggtagaacctcggggtctaccggcgagggacctgagattgtagtggtgaactgccggaggggaaggaggtcggcgcctgggcgccgtggctgagcgagatgagggaagggaggtggcggttagggcacaattaggtctcccggctccctacaggaagccgagcaataatagattgctcttgcttaaaatccaaaaagtctttacagccaagtatatataactctcctctccctatattaggaaacaactatctctcaactaggaaataataataacttgggccttaagccctgtctactgccggctccttcattagccactaatgggctttttcctctgataagagacgccggtcataacatctctccccgcctgcgcaaacagctcgtcctcgagctggaagtcggggtagtgctggcgaaactcctcaagcagctcccatgtggcgtcgtcagcggagagcccgcgccacttgatcaacacgcgccactcgcccctacgaagctgggcacgcagcactgtctccggctccggcaggacgcgaccatcagccactggaggcagcgtggaaggagcagtcggcggatcgccacgatgtggtttgagcagcccgacatggaagacgtcgtggatgcgggcgctctccggaagctgtagccgataagcaacctgcccaatgcgctccagcacctgaaagggaccagcataacgaggccccagcttgcgctgcgcacgagggtccagggactgagtagtcctgtgcagcagcctcagccagacccagtcaccgacttggaactcaacgtcgcggtggccggcgtcgtagtacttcttggagagttgctgcgcctggagtaagcgttggcgcacctcagccagcatctcgtcccggctgcgtagaagggcatcagcagtatctgtacgggccgtccccgggctgtacggcagcatgggcggtggggaacgcccatagaccacctcgaaaggtgtggcgcgcagggctgtgtggaaggatgtgttgtagcagtactccgcccacgacaaccagtccacccacgcgcgaggtctgtcacctgtgacacaacgaagatacatggcgatcaccttattcaccacctcagattggccgtcagtctgcgggtggaacgcagtgctcatgcgcagcgatacgcccgccatcttgaagagatcgcgccaaacatggccggtgaacacggggtccctgtcgctgacaatggaagaagggaacccgtgtagccggacgacgccgtcgaagaaagcgcgcgcgacggaggcagccgtgtaggggtggccgagcgcaatgaaatgcgcatacttggagaaacggtcgaccaccgtgaggataacggacttgccgcccactttgggcagcccctcgatgaagtcaatcgagatgtcggcccacacctgagacggaacgtctaggggctgtagcagtcctgccggctgcaaggcttgtgtcttgttacgttgacaagtgctgcatgagcgcacccaatcctgcaccaaggagcggtcaccgggtatatagaactcagcccggagtcggtgaagggtcttttgtaccccctcgtggccagcagagtgtgccagtaggagggcctgatggcgcaaatcaccatggtcaggaacaaagatgcggcgcccgtgcaggagcagcccatcttcatggcgccaggggccctgcagctcaccagcagcaaggcgctccaggagctgcagcgcatcagcagcaaccgtcgtggcttggcggatgtcggcgatgaacacgaaggaaggcccggagagggtgctcaccacagcgcccccgccctcctgtgggccgtccaactcggcgtcacggcgggaaagagcatccgccacggtattaaggcggccggggcggtactccacggtgaagtcgaagccaaacagcttgctgatccactgatgttgcggaacggtggagagacgctgatccaagagaaacttcaagctgtagtggtcagtgcggatcaagaagtggcgcccccacaagtacgggcgccaatggcggacagcctgcaccagtccaataagctcccgttcgtatgccgcaagcttgaggtggcgcgcggcgaacggtcggctgaagaaagcgaggggcccggcaccttggtgtaggacggcaccgaatcccgcaccggatgcatcgcagtccaccatgaacagcttgtcgaagtcgggcatctggagcacgggcccggtggtgagggcgcgtttgagcgcctggaaggccccctctgcatcgtcatcccaggcgaaagcgtcgcggcgcaggaggcgtgtgaggggcgccgcgatgaggccgaattcccggatgaacttccggtagtatcccgccagcccgaggaaaccacggaggccccgaggagagcgaggcgccggccaagcagccacggctgccaccttgtcagcatccatggcgacgccggcggcggagatgacatggcctaggtaggccacggacgtcgccccgaacgagcacttcgagcgcttaaggtggagctggtgcgcccgaagctcgttgaggacgatggcgatgtgctgaaggtgctccgcccacgtggcactgtagatcaaaatgtcatcgaaaaacaccaacacaaacctgcgcaggtatgggcgcaggacgtcgttcatcaatgcttggaacgtcgcgggggcgttggagagaccgaacggcatcaccagaaactcgtagtggccgtggtgggtgcggaacgccgtcttggccacgtcctcagggtgcatgcgcacctggtgatagcccgaacgcaagtcgagcttggtgaagaagcgcgctccgtgaagttcatcgagcagctcgtccaccaccgggatggggaacttgtccttggaagtcttggcgttaagggcgcggtagtcgatgcagaaacgccacgacttgtccgccttgcggaccaggagcaccggcgcagagaacggcgaagtgctaggccggatgataccctgggtcaacatggcttcgcactgccgttccagctcgtccttctgcagctggggatagcggtatggccggaccgccaccggcggcgtgcctggcagcaggtgaatccggtggtcgtacggccgggctggtggcagaccttgcggctcctcgaagatggcagcgtgctggtggagaagacggtccagcagcggctgctggatgtcggtggtgacagcagctgtgtgtgctggtccagcagagccgcctacacccctccacaggatgcgccggccttgtcgcgagaaggccatcgtcatggccccaaagtcccagaggatgggacccaacgtcctgaggtagtccaccccaaggataaggtcgaaactgccgaggtccagaccgacgcaggtgatggagaagacctcgcccgcgatgctgatagggacgtcgtgggcaatcccctcgcagggcagccggtcgccgttggcgacagtgacacggagctgctcccctcccgccggagagagaccgaggcggcgcattgtcgtgccccggaggaaattatgggtggagcctgtgtccagcaaggccagcaggcgctcccctttcaccaaaacagggagcagcatggtgttctctgtccggatacctgccacagtcatgaagtcgagacgacaaaagcattagcgttaggtagctccggagcggcggcgtaggctgctgtccccgcagcagatggtgcagcggcgaagggcggcccgtgcgcaggggcagcagcgtatggggcgccccctgctggtgctgatgccggcagtagcgtacccccatggaagaggctcccgtcgacactgccgtagaggacgtccggtgcagggacgccaccatgcatgacgctggatgttgacgcaggcagcggttcatggaccgtggtcgcctgcgtgtagacgggcggtgccgaagagtcgagaagccaagccggaagcggcgagggggacgcaggaaacctgagctgagtgatcgggactccctgcgacgctggggcagacaccggcgggtagtaggaggacgatccctcatagggcatcccatatgcataggcgttggtgacagccggctgtgagtatggcggcgacagtagcggcggatgcgggaattggggcggctgcggcgcataggatcccgccaggaaggagcgaataccagccactgcctgccccaagtccaggacggccatggtcagttgctcgaacgttaggggcctgacgggggactgcgctggtggtgctgatggggacccagacgtgccggcgagcaccaagcctgatgttgaggaaggaggcgctggcggctgcgtggtggtggctgtgatctgcggctgctgcgtggtggtgggcagcaccggcggctgggaggtagccggcggctgcgtggggaagacaggcggctgagacatcgatcctgaggtctctgataccagattggtagaacttcggggtctaccggcgagggacctgagattgtagtggtgaactgccggaggggaaggaggtcggcgcctgggcgccgtggctgagcgagatgagggaagggaggtggcggttagggcacaattaggtctcccggctccctacaggaagccgagcaataatagattgctcttgcttaaaatccaaaaagtctttacagccaagtatatataactctcctctccctatattaggaaacaactatctctcaactaggaaataataataacttgggccttaagccctgtctactgccggctccttcattagccactaatgggctttttcctctgataagagacgccggtcataacaggaccatccaaattctaactgtcctagcattgtggttgtgataatccaatgatactccacatgcatgcagcttgtgccatgatctgatggaattataaattccccgagccagaacacaaagcacaaaactttttgattaatgcaaagggaccatccaaattccaactgtaccaacattgtgattttgtgataatccaatgatacttcacatgctgatgtgatactctgatggaatatttactggaaattggaatccccaatgatacttcacatgctgatgtgatactctgatggaatatttactggaaattggaatcctgtgttttttattaactttgacagtgctgatgtgctagttgaaaggttgctgttcaaaaaatgttgctgtacgaaaatgggatataagttaatactaggaaatcaatcattatacgagtttcataattgtactgtttatgtcctacttgatatgttttgatccgtgccatgatatctgtcacactgagctaatttattctcgaaaggtcagatgatgatgtattttgaaataaaatacatttcccttgattttattcactggcttgggggtctagaagtgagatttcgtgaaacatatttcattaacttatttatttactcaaactttcgaacagagtttattatctgcataacttattatccttcaaattttacagctattgcattttgttcatatctttttgtttgttttttctacgaaaagtgtatctgattagatttgtctgacctcttggtgtttaaataacaggttagtgaggctagaagtttggaacgggatcaagtagagagcgacctaacatttgctggttttgcagtatgtaatcttcctcttatgcatctttttttctctctcaacattatcttagttatgttggatgacatgtttatcttaattatgtggctgtgttggatttggtggactcaggtcttcaactgtcctataaggagcgactctggtgctgtcttaaaagaactgggacaatcttcccatgacttggtatatcctcctatttatcttgtaaccatttattattggtaataaattcagctgtgccggaaacttgttttcgtgccagtaatgtgatacatatacaagtacattgcccaaggctagcaaacatgtaccttagaaaatttgtaatgctatttctgttttgtttgactaatgtgcttattggctcgctggtgttattaggtcatgatcaccggagaccaagcattgactgcctgccatgttgctagccaagtacatatatcttccaaacctgttttgatcttgacacggataaagactggcggttttgagtgggtttcgccagatgaaactgatagagctccgtacaggtaactgtctatatacagtttcgctgattcttttgtgttgagctcatacctcgttttctttcctggcaaatctttaccctgttccagtgtgagagactgagagtagtctgatctctctcttcacaacacatattatgttgcttgttttatcatctggtctatgccaaagcattgtgtttcagagactaagtttttataaagattataattatgtcccatttgtccaggaaaacgattattattacaagcatttcttctagttaacaaacaatataatttcttttcttttgttaatctctcagacttagtgttgatatattaagtctgtcgtttagcatctcttctggcattgttatcacatacagtttgtggcttgtttgagtcctttcgatttaatattgtgtatatgctgtttttcagtgctgtggaggttgcagtgttatcagaatctcatgacctttgtattaatggggactgttttgaaatgctacaaagtactgaggctgttctccaggttatcccttatgtgaaggtatgcgtgaacagattacatcccctgtacaaaatatgaaagctttcatttgtatgctaagtggttattatattttttatattgtcatttttttaggttttttcacgtgttgccccagaacaaaaagaacttgtactgactacattcaaaagtgttgggagggtgacactgatgtgtggagatggaaccaatgatgttggtgcactgaagcaggtgattacctgtcctgtatcccacttagttttgctcaatttacatagaaaactactctattactctggtttctatttctatgaccttattccacacatgcattttatttgttaccataacaattattgcattgatcctggaaatgtttactgacactgattgtgtagagactttcctctacaatttgtgccttatattcatttttcttgttttattagttgagggcatcatggtaaatacttctcacctattatgtaatatataatagaatgtaactggacattctttagtctttacactttcttaagaggtggcttatactatgctagaagtatggcatggaagaagtttgagccagtaactgagtggcagtggcagaggtccatgctactgaatactcatatgcaaattgaccaatattagcctggtgttttgttctttccattacctgtttgataagtcataactgtagtacggtgatagagtgaaccacttaaatgatagtaatttcaacatttctggacctcaggcaactgtatattctacattgcctttgttaggcctattatttttctactgacactttgaatttgtttactgaaatgtaggactcttgttaaccaccttatcatatcattgtttttgcaattcatttcatgatcttttaaaatatttcaggcacagttggcatagctcttttgaatgctcaaccagttcagaaagtcgactcaaaatctgggaagttgaaaaaacagaagcctgttaatgaagcatcatcacaagtgactgcagcagctaatagttctgctaaagcatcgagcagccgccccatgactgctgctgagaggcagcgagaaaagctgcagaaaatgttggatgaaatgaatgatgaaactgatggccgttcagcaccaattgttaagcttggtgatgcttctatggcttcacctttcacagcaaagcatgcctctgttgcccctactcttgacatcatccgtcaggggagaagcacgctagtcactacacttcaaatgttcaagattcttgggctcaattgccttgcaacggcttacgttctcagtgtcatgtacttggatggtgtcaaactgggtgatgttcaagctacaatcagtggtgtctttactgcagccttcttcctcttcatctcccatgctcggccgctccaaacactctctgcagagcggcctcaccctaacatattctgtgcatacgtcctgctctccattcttggccagttcgccatgcacatattcttccttgtcacagctgtcaatgaagcatcaaaacatatgccagaagaatgcattgagcccgactcaaatttccatccaaaccttgtgaatacagtttcatacatggtgaacatgatgatccaggtggcaacctttgctgtaaactacatgggccacccatttaatcagagcatatccgagaacaagcccttcaagtatgcattgtatggagcggttgctttcttcacagtgattacatcagatatgttcagggatttgaatgactacatgaagcttgaacccttgccagagggaatgcgtggcaaattgatgttgtgggctattctaatgttttgtggttgctacggatgggagcggcttctgcgatggatgtttccaggaaagatgcctgcgtgggagaagcgccagaaacaggcagttgcaaacttggagaaaaagcgagattaaaatcatttttgctgtctgcactttattctttaccctttgctgcccattggttacttggcagtacatactgatcatgttttggcatagttgcaatctaatctgtagcctaggggaattttgggagtgtaggccctaaatgataggaggttacagggtcggcactttacatacttgtcaggattattaaaattttcagttaccatatgtaagctgatataagttggcatgaatatcggttgatattagatggcatcaatatagtttgatagattctctctgtttcacaaattataagttattccgactttcttgactaaaattatagttgatctgttgcggatatggaatcgctgtacggctccctgagtcgtcaaacctggcattgcggcaccttattgtatatatataatttagtgaaagctttgattgataacttgatccagtacagattaaccttggtaacagtcatacagactacaaagaagcttctgatcgtgcttaaataatcactgagctcgatcgactgttatggtccgttcttcagtattctattcggtttagtggattgacgattgatgatgacaataacagaaaagtaaaacttgtgctgtcgtgtcatccaggtctctaaactcacaaatcgattgtttaggtccttaaacttattcatctgtgtcatctcggtctctaaacttgtttaattgtgtcattccggtctctaaacttagaaatcatccgtttagatcaacttcagttgtgtcatct

SEQ ID NO: 4938 - DNA, 2869 bp, Sorghum bicolor
ttttcttttcgttgtttctccattccggcaccactcagtttcctatctggtgttttctttttcttattccgcttttccttcttgaactcaattctgttttttttatttctcataaatgtaaataacaaataataaatacaatagtattgtcttctgaatcattgatccttccataaaaatatattatagtttgaattaaaaacaaaactcattttttattaaaatatagatcaactagtggttcaacaaatcaaactatgaattaaaatcttaaacagtttgttgtctaatctagtctaaataaatgttgcaaacccctagaaggattacaatgtgaaaattagagatgttttctgtagtcatcatcgacgagtagaattagaattaaattatgggtcatcaaaaaagtgatgaagcttaatattccattgtggtaacacatggatagtatgaaaattaaatttaagatatatttctgtctaaatacttagtgctttgagaggactacaatgtggaaaatctagagatgtctctcccgacataatcatcagtggatagaccaattcgtaataagttggaaaccaactccttgctatatttaatcatattataattacatatatctaagggtcctaaaagagtcacgaaactcaatattttagttgaggcaacacatggatagtatgaaaattaaagttatgatatatttatatctaaatatttcagcattttgcaatggaaaagaaaacatctatgaaggttgttatttaattcaatataagtttaataggatgttgttatatttttaccaacatcaatatcatgatcatcataaaataaataaattttgatttaacatttttataaaaaaaatataaaataaataaattgttacaacacacgggcatgttttgcatgcataatatttaaaagctaagggattcttttatccttttctttttagttttcatactgatctcaaactgtctaggtttaaaaaaaacaaacggctttgaaaatttgagggaggataaaaaaaatcggtttttgtaaatgaaagaaggtaaattaggccttgtttagttcacaaaagttttgggttttggctactgtagcactttcgtttttatttgacaaacattatccaatcacggagtaactaggctcaaaagattcatctcataaattacaggtaaactgtacaattagtttttatttttgtttatatttaatgcttcatgcatgcgatcaagatttgatgtgacgaagaatcttgaaaatttttacgaagccttagacgacagctaaagtcgaggggtgaaaagaacttttccttttatagcccggcctaactattgggccgccggtgtcatcaacgtgtgttgcttggagatccaagccgtacagcatggcatggactcgtccggagctttttctcgcagaaccacctggtccatgtccgtaggcacgtccaagtgctactacacagaacggtttcatttcatgacaggatgattcgattcgatgatacgaaactagccagacagctgggctcgcgtccgtaccaggatcggtacattccgcacggcctcatgacgcaaacgaaacagactggtccaccaaatcggcgtgggcgaagaggcccagcccgcttaccggcctgggaccgtggccgcctgccgcggggggaagaactgcccaaaaagaagtggtgcgcgtgcgcatgcgcgcttcccggcgccagcccctgcgtccccgccgcgccttcgtccgttccattccgcggtgcgccagccagcaaaggcacccgccacccccggcaacggcgagagagaggcctttaaagcgacggaggaacgcacgggggccgagcacgtagaagcaaccgtttaggcacgaccggcgccgggagagggggtggaggaggaagcctccctcgcttccctcgccgcagcgcctcccctcctcctcctccacacacgcacgcatcagctagcgccatgggaacagaggtgctccgcccgcacgattgcctcgcccgctctaggcggccgcggccgctgcgccctgccgccgggaggaggacggcggcggcgcgccagggccagtaccatggccgtggcgcgcgtggcgacaagcggagcccctcggcggcagtgacggtgccgaggcaggtcgtcgcacggaccaaggtggcggcggcggacgcgtacgcggggccggcgttcggcgccatgtcgccgtcgccgcgcgcgctgccgctgccacggtggttctcctctaggacggtcgccgacgacgacgcgacggtgccaggcgtggacgacgccgccacgcgggagcttcggcggctgctggggctccattgacgcgtaataaggccaggcacaattgtaaaaaaaaaaaagaagagcaatggacaggcgccatggctgcccatgagcccagcaacacgtgcgcacgcaaggttcagatgcgtgggtgtctctttccatcgatttcttctcggtttgcagctcccgtgcggccctggcggcgccggcttcggaatgcctccctttgcctgatgtttttgtgaaggacaaagggaggccagaagcggtggcaccgcgaaatgttcctgttccgaaacaagccgtcagagacagacagagagacaggaagcaaaacatgctaagctaaaaaattcccaccgcttctcactcgattttgtgctcgaatgtgaatctcatctgtaaatactccccttccttgcctcgccttcgaaattgaggggagggtttaccttactctaaaaaattgacagaaattaaagtatgtcaggttcacgaaaaggaaaacttaggtttgttctagaaatctcattgga

SEQ ID NO: 4939 - DNA, 10937 bp, Sorghum bicolor
tacactcaaagctctggtggggagctccgacgccctttactcctccgagccataagtttgcagtatactattccaaagccctggtgtcagcactctaaggcacataggaagataaaggtagattcaccccattttcagttcaatagttacactgtgagtaaactttggggccttcctataaatccaaactcatccattacaaacacctttgagtttggttttgatttcattgatccttaagctttatctgagctatctagtgctagttttcacaagtgtgcatcacatccactcaataatctcacgaatgtcaagctatgtaatcatatccacttaatagtatgtccaaaggataagacaaagaacctatcactattccaagtgtctcccatctccaatcaacatatagaaatagatagttcctagccttcgtgcaaccaaaatgaattccatcattaggggcatgaaaatcataattgccaatcaatctcatcaatgtgatctcactaagtaatattgttataaaacatacattagccacaatgattgtgtcatttttaatcaccaaaactgaattaggggactatatgttttcaaagacaacttgtcaacaagttaaccagacaatctgctaggtgccaccaagacacgctagatcatacaatgcacataagtaggatggacgcttgaggatagtaaaggattgagcctcatcgagcgatccgccgagtgccatgaaggcaaaccagagtatataatggcactctgttactacaattgagtaattattgccctgcacataatgccatggatgatccaccaagtatcgtccctatcgtctaatgcatgctctagtgttttccaagtctattttaagtttggtttgtcctaattcaattttttttagatcctatacataaaacctaccgaatgagcctcttatgcctaagtctcaaacaagagtaagtatcttgtgctaccaaatattctcatttcaattccctcaagatgcatatctcagacccctcttaatagtacagcaggaaaacataaaactctaatgcacagtacaatgaatatcttcgaatcccaaccttgcattcactttgttgtatctttagtcttcaagaatatcctttgtgccatacgccaatcaacaatccaagtcttcatggctaagacacttatggtcatttagtttgctactatctcacatggtatttccattgtaaaacacatgttagtcacattttgattttgtgttgctcctcttctccaatgttggatttgagtcaaactatggtttgtattcaaccgttttgcggcatgatttgttattgtggagtcaacattgtgaaaaagccatggaagttaatgacacaagaagaatgtcatcatgggttggcttactgtctcatactacacacccttgatgcctcgtttgtgatagtaggtggataatctatatctatatctcttataaagctgatgatacccactataagtctgcctcaacatgcaagccatccacatcatctcccaataatctccgtatgggtatcttcttgttcatataatagttgtagtttgatgtattgtcgacatggtatggctaaacttgaaacatatatttagagaactagttgatcgctgcatggttgttactctttccataaaaggagaatgtattttttcataacaaatcaaataattttaaatttaatcaaatatatcaaaaaagcacattaacatttataatataaaaatatatgtaattaggttaattctggaatatatattttttagatctatttagagtcacaaatgtttataatattttctggtttctatgaacttagtcaattttaagtatatttggcttcttgtaaaaaaaagtatatttgactccatccaaacgtataattgcatctatctttttaattgtttgaggaagtatatataaaaaaaatgttaaaaaaacgttcgcgagcaaagcctctgcgagcggccctgcatctttgttatcccgtccggccgggcgactccagtgaccagttcttccccctgtctctctcgctctcgcgtggttctcccgtgcccccggcgtgagcgcgctctttctctcgcgggctcgtggcgacagccgccgccgctgccctacgccaattgctcaggccttctttgggcccttcgccggcggcgagcacccaccaggtacgcctaccccttttcttcccctaacttaagctatttgttttcaaatctgatgtaattacaagtgtagtgggcatgtagtattatgcctactaactctattttttggcaaaaattatcgggtgtacctgtgtatacccatgccctttagtgggttcgcccctgatttagctagtaactctcagtagtaaaacctctgttcctgcatgttcacagatgcagtttcactgttttgatatattttatgatgcagtacctcaatttatagtgtgtatatagagcataaaccagaggtttgagttgggcttgtgaattctagttaattgaaccacattcaacgatcatgcccagcataagctgctctcacgtgatatgtgcctttttacgcaattgcaaatatgtaacaaaatttcgttgttccttgggaactttccaatttttataggaagcctttgaatctgaacattgataggcgtttgcagagagaattgataaatacatcatcagcctgaaagaatgggttatggcatgagtaggctagaagatgaatactatgagcctgaagggcagaatactgatggatctggctcagttcaagtgaacaatgagtttgcagaactgcataacgatatttttcatatgacccgaatgagatcaagacttactgaaagctacaagtccatgggtaccaacagaggcataatatcaacggccaagttattatctcaaagggaaattgattgttctggaaagaggatgttctcttctggtgaccgtgcatttgttctaggtcgctatgttccaatgaacggccctcagttattggataggatggattctcgtgcttatgtttcgcagttttctgctgatggcactctttttgttgctggttttcaggtatgctatgctcaaccaacaatagtcaaggtttttagcaagttcaagtcagaatttcccggtgtttagtttactttttctgtcactatgttatgcattttttaaaattaaagctacaaacataatataataataacatttcttttcgttttcagggaagtcacataagaatatatgatgctgatagaggctggagcatacacaaagacattcatgctaggtgtttgagatggacaatcagtgatgtatccttatcacctgatcagcggtatcttgtaagtttctcctggcttttcacaactttagcttgtcacccttattcacttttcatcggtcatcattgtaaataaatctctttcatcattcttcttattgagaagaaatattcaatatgcaactctgttcaacagatgtgaataaaccgaagagtatcagatgtggttacattacatgttttacaacaaggttttcctttttcattattgtgtttttgacagtagtttccagttcttctagtggaaacatgttgaagttgggaaatggatgtttcatctggacagttatcaaagaaactagtatccaaaaacgtttttttgcaatatggaccttactgtgtctggctaccaagattaaatgtatcaaagttgttctgaccattaaatacattacaatgactggaaatacctgtaggacaatgaagtttacagggacattttagaagattaaatgtatcaacgttgttctaaccattaaatacactataatgactggaagtacctgtaggacaatgaagtttacagggacattttagacttcgtctagtccatttggttctttcatttctagtccgccctttcatgacatgttgttacatattttgttttttggtatgaccatgtcttggatgtttcaaaatgcattctagctttttatgtttgcatatcatattatcatttatgtatatatgtacttcatcagtctgtggaatgctgtcttgctccccatttttgcttgcatatcaggctgaatcattgtttttgattatcaatctgcaggcctactctagtctggcacctattgtccatattgttaatgtcggaaatgcggcaagagaatcctatgctaacgtcactgtgagttcttactagagtactttgcactcatttgcttttcgagtttgttatgataaaaaagtcgatacagttgggtttgctttggactttcacatgcctggttgcacagcaaacaatgacttcatagaaacatgtttcttcaataatatgatttttatgttaatcatccacaactgcatttctttttaacttccattgtgaataaattgaggaaagtatacaagcaccaaacctattttagtcaaggagcctctggggatttaggagtggtttcttgttaaaataatagccaattcattaactttttatttcttaaaattggcattcaatccatcagctggttggtgctaaatattagaagacgagatgtacctgccctcccctagtaagtgtgtttaccattcagtttaatcgatgaacctacgaatatattgatgagctcagttacgtgatagaatttgtatatatgtacttagggatgatattcactttgtttagcagttaattaatgtgggtgcttgaaagcagttacaataccttttggagatgtaccatgttagatgtaacatcctttactgtttattatacctagtcaacagtaattacaattttacatttttctgcaggacatccatgatggattggatttttcacagcatgaggatgttcaatattcgtttggaatattttccgtgaaattttcctctgatggacgggaacttgttgctggcagcaatgatgaatcaatatatgtctatgaccttcatgcaaacaaattgacattacgtttacctgctcatacagtatgaaaattgcttactttcttgcttatatttcctttgattttcatttgatctagtccctctatcccaaaaaggatgcaattccagctttctaccaagccaatctatctcaactttgaccaaatacgtaccaaaaaaaaactatttatgatatctaataattatgattcaccatgaagtatatttccatacctatttagagtcataaatgttaataacattttctataaacttagtcaaacttaaggaactttgactccatccaaacccataattgcatcctttttgggacagaggtaataaattaaatttgctacatttacatggagtcctttttctagttgacatctgactcttgggagattgggattgatctacaactctatttcttaatttggttatgctctgttatctgattgctccaagaaaatctgttgatgctttgtacaaatgcaattcttatgtccctcccccttgtctggcaagctgcagtattgatatccaaactgtagacatgagtttcagaagaaagaaatgatattgctgatccaaggtattgttggagaagtgggccatctcttgattcctggaggcccttggaaggaggtccccggagaatgtcccgacaggggtccctctggagtttgctagctagacagaagcagccatcggaggaagcccccctcagcattcagccattcaccaaagggatcctctgttggattcccctgggacgggtctgggaagcagcgatgaggatagtttttcctaaaatccatcagcagaagaatggttttggggggtgcacctcagttctctcccaagccagaacgcagtaccctctgttggagaaagggctgtcccaggatggagggatagaccagagccaaatatcccaggatcatcccttccacatgtacggaaggatgagggggaggggggggggtgtcagtcaagaagggtcatttcattaagaaggaaaaaggtccaaacatcatgcagaaaaaggaaaggctaaaagcccctcccgaacacacaggagagtacaaaaagacatgccaagttaagggcacaacatgacaacaaccagccctgctccaaccaccctcaagggtcggggccttgcgacctaaggagctcatggagggccgaggtgccagccaaacaccacagcctgctttcagtaggtactgtgagaaggagattctgaatgtttggtctagcaccttcaaagacaatggcattcttatgtttgcgaatttcctaggcgagaagaatgattagagagctaagggtctgtggagataattcattgagaaataagcatgtagcatccaccaactgttgtgccgcactcccactcctagcctttggatcctaccaaggttccggggccacttgtacttgtttgtggatctattccacaacaggttagtggtatgggtcatttgttttggtgtgcttaaaaaagacacaggagcccctgccttgaatgtctgccatgccaatttaggagctactagcataggcataactgcataagtgcagttttgaccttcctgtattgaaactttaagccctttgaggttacagagctgatggtattgaaatttaagattatggagctgatcggtacagcagcaaacaagttggagatgttctaataagccaagtgcactgtttggcatacatggttcccagcctggttgattttattattttaagctagacatgaaccacaataaattctcgtgcactgaagaatggctaggaaatggtgcctcaggcgccaagcaaggactgattaacaccccatttcaaccaacccctaggaacacttttatcttgcattgcacaatttttttaagagacagaattatgcttgcttggggacaagttagttctgggtagagggaagatgccactggctggtgagaagcagcagagaaagcataagttgatggaagaaatatgagaggccctcaccaaggatggaaacagaacataatggagaaatgcttatcaagtagggtcactgaattatgagctggagaaaggtgtggatgagtggttgtggcctgtatttttaagtcaaactgaaggggtttataaaggtgttctgccttctatctttaagaaagaaaaggcagatttctagtgtcgaactcccctatctattctcatgactcatatcgtgctgctgtaccactaatcctcttcaattttatcacaatttgacaggttacacttctcatgctaccttgcatcttgctgacaatatagaatgtcctccttccccctctctggccccttccatttgccccactcaatacctcttcggcagtttgcaccttacagcagaattaccgcaagcccaaccagcactgcaatgtgtgaaccccttgagtggaatgtggcactgggccgtggtttcccattggccccagttccaatgccaccctcttcaccttgtgctatgtacctacaacctatgactattttttagaacatgctgggcatgtttttcatcatgaagaagagaaaggagaaaaagacgaaaagcaacaagtacatggtagagcaacaagcacaatgagaacaaatagctaggagtcaggaactcaaactttggtagtgatgagttcctcttcttgttgtacactttctctgcatgtcgattgccaagcattttgaaagttgtgggtgtgaaatgaactgttgtggaagtccactggagtgaagctgacttttgctttgatatagcagccaaaataagtcaggccatacataagaaaagtttccaatcatggtagcctttttccatttatgctatttattggacattgttagatgacaaatgcaaaagaatgtaaacttatatctggatgttttatgatgcacccaacagacgggagtgctatgtgtctgtcacagctaccgaaacctctcttacttgctctgtggctgcgaattgtttaccattttgatagtagttctatacttcatatttgtctgttttggtatatagaatgatgttatcattcgattttgatctttccagtctgatgtcaatacagtagcatttgctgatgaaaccggccatctcatatattctggaagtgatgacactttatgcaaggtaggttgttgttctaaattatgtaaaattatttgtcttctccttcctcagatttcttcatcaaccatgaaggcgcgggggggcgggggggattttacttcctaggatgtttttagttgtctggataacccctcaaactatttttcagtttaacccctgaacaattttgttgtacacaggtagtgttacaagttgaaattttgtgggatgatagatggcatcatgctatgttatgaaatattttcatgactattagtattaggttggagcacttgaaactgctttaatcccaaagatgtgtaaatgtttgatgataataaacaagatcaaactatttctaccatcaccaaaacttaaaatgtaacttttacaaggagaaaaaaacaaaatgttattagggatcatagtgtcctaattttagtaatttgcgggctaatgtgggccaaaaaatagttgaggggttatatgtgtgttagaatgagagaatatgaggaatgaacaatagtcagttatggatttttcacagtcctgtttcagttctttagggctggatattctgaggtctccctgggaacataaaggaaaatgtttaatgttctaaattgcattcatttcagcagtgctgcagtatgtgacatttgtagtgtgcaggtttgggacaggcggtgtttgtccacaggacaagctgccggagttttgactggacatttgcatggggtaacacatattgatagtcgtggagatggccgaagtttcatatccaatggaaaagaccaagcaatcaaactgtgggatgtcaggaaaatgacgtccaatgctgataggtactttctctgaatctaaatataagtccaccactccacctagccatccgcattcttctaccaacataaattcatatacaatatatgacacattttgccttctcttttctgctttgctccttttttcattgtaactgtgcttacaatgatttatgggcaatatgatcataataccacccacgttactccatgtgtatgagtccaaaatgaacttataagtggaatgagagtgtgttaaggcaataatgtcaaatgtgtctgatgtacacgaggattatgtgttgtcaccctcaacagtggccagtcatcttacagtataaagttaatctattcttctatgcagttgtgcagacggagccccaagttgggactacagatattcgaggtatccgcagcagcataaacagttaaagcatccgcatgatcagtcattagcgacataccgtggacatgcagtcctccggacattgatccgttgctacttttctcctgcttacaggtgacccttttacctccattctggtatgattttattgacagttctactagggaagtcgtctccttatcatacgagcaaccaataggattaagtgctatttatcaaattatacggtatatctaggtgctcatgtgattgatgtctagttttttgtttctgcagcactgggcaaaagtacatatatacagggtcgtatgattcctgcgtttacatctatgatgtggtatgttttgtcctgatacgcacttcatttatgccagcattccttggtggtaatcttaatctgtctgctcgatgaatgtatgccatctttcacagcagtggatagagaacttcgttttacctgccgagaaactgtgcatcatctgacgagaacacagaacaccagttacggagtactagtgataaacaatgccagttgattttgattctcagtttcgtttcgtgttgcaggtaagtggatcgcaagttgcgaagctgaaatggcatcaaatggcgattcgtgactgcagttggcacccatttgagcccacgcttgtgagctcatcctgggacggccaggtagcaaaatggaccagtgcacgtgatcaacaggcttctgatatagattgagtcgaccgtgcagcgagtgatcttttactgctcgtggttctgggctacaaaaacatacgtatgcaatctaaagtaagcacagctcataaaaaagaaagaagatcatgtgttgtagtggtgaattgtaatttgtaaatactgaactgaaaactttgtgaatatgaagttgtttcataaggcttcatgtccgtgtgtttggttggtcgatgttcgttaacttttgatgggcaatgagctcatccttttgtaaatataaaattaccttcaaacaggccttgttgcactacagtaaatcacttgcaaagcaaagtgccaacgccgtggttccccctttttgttatctttgatattaacgcattgcatttgttatcttttttttttttactgcagaacacttgcaaggcaaagtgacaacaccaataaaatcgcattgcattccagattttccagatccaagcaatacagatcttcctacaagttccagcacgaacacacagctttctcacaatcaccaactgccaagacaaacccaaccaatttcgccagatcaggaggagaaacgaaacctcctgcacaaatccggagaccccggctactacttcttgcctttggcgttcttgccgcccttggcgtcggcgccgccccccgcggcctgcgccgccttcctggcagccttctcctgcagcgccttggcgtcccgctcccgccgctgctccggcgtgagcccgtcgtcgcgccccttggccgcgggccgccgcgcctgcgccctctgccggtcgcgctccctctggtcgccgcgtgcagcccgccagctca

SEQ ID NO: 4940 - DNA, 8993 bp, Sorghum bicolor
tttgtgcataagctcctagtctggcctctccattgcgagtcatggtggaaatgttgtgcaaattttcttcagttacttgcaagtgcaggacaatttgattctatcaacatgggggccattcagttgattcagttgcacattgctattccactcagagaggtgtattgtctgttattcacctactatcatgagccagtggagtggaagcccccatgggtatctctggtatacatcatcagtaatagacactatattgcttatagcctcaggatcaggacacccacagtgcctcatttgttctggtggccaatggttgctaagttgaaatttggtgatgctcagtacaagatatttttgggggaggtaatgggtcagtgcttgtatatcagatatgtggcgagtcagttactacatattgttctctctccaaggcttatgagttgtatagcttctacacagtactcacaaattatctttagaatttgtatgcctgaagccatacccttgttctcagttaatcatactcctgttgtgttttcctacattgaggagctgcatcatgattctgttataccaaggatcatttctccagttagtaccatgttagggaagaggtgctatcgacagttttggaaaccaccatgggcatttgtagtatgcaaggttatcacctggacatttcttgcaagagtacgtaatctgcagagcagtggaaccgtggttgcaatgtttctggggcttactggaatgaaactgatgaccgattatgagtttgctacgaagctaccattattggagcacatgcttattttctctgagatggctatcctcaagtttgccaaccaactatgtgagagctcaagaatttctaaattgtttcaattccagaaaatcacttttgttgcttgggatgatggtgacatgcagttgagccttggcatttatatgggggtcactatgtacatattcagaaaatggatagtcacattgaattttgatggcaagataattttgctatgtgtctccaaaatgagaaagttacttggagtaaatcagattgatgccatgctgattttgcactgggctgaatacaccaagaaccatattttcctatttgggagtaagcatatgtccatggttacctcttactggagcattaaaagtagatttcagataattttgtgcatggagtatttctgttgccgctctttggggttatgccacatacagattagagatcatcaagaagttggagataaggacaacttgtgtactcaatcggcactatcacatcatagtgtcatcaagcatgtggagtacacaaatgcaaggatatttacatgcatcagtaagacagtgaattgtttgctgtcagtgaggttttacttctacaacttgatgattgaggatccttaacatgtcgtgatggcctatagtaggaaatgactccttcggggaacctccaagtacaaaacatggtgagtggtttgcttctaaatttgttctgccaacagttcctgtcattcagttcaagcatctacaagtcaaggctctagaactatggggaccatgtataagacattgaatgtttctagcatgctggcacttcaattctataatctggtgattgaagatccatgaaggcttggatgaaaaaggaagacaatgtcgaacatctgttgattgaaaaattcatagcttgaggacaagctatggcttaaggaggggagaatgtcatgaccttagccatggacctgtaataagtagttagtgggttgagtgtttgggcctacaagcctattatgtgttggggtttggcccattaagtaaacctatatatgtacaccctatgctgtcaattggggacatcgaatataaacaaatcaactatctcctacccgtactgtctccctcctcgtttctctgcttgagacggcgccaccgtgctctccgccgagcgtgttcgccggcaaaaccttctagttatctaggatcgtgacatgacccagcagatgtgggcgtgcaagaacatgatgtgtgccgcggatccgtgccatggccgctacctgacggcctctaccatgttccggggcaagatgagcaccaaggaggtggaggagcagatgctcagcgtgcagagcaagggctcgtcctgctttgtggagtggattctgaacaacgtgaaatccagcgtttgtgacatccccccgcgtggcctcaccatggcctccaccttcgtcggcagctccacctccattcaggagatgttccggcgtgtgagtcatccgttcacggccatgttcaggaggaaggccttcttgcattggtacacgtgtgagggcatggatgagatggagttcactgaggcggagagcaacatgaacgacctcgtctccgagtaccagcagtaccaggacgctacagccgacgaggaggccggctatgaggacgagaacgcaggggaagagtgagggctactgccatcagttggtgcggggttttgctttaggattttctttaaattctggtgatcttttaagttcagtttggacgtttttgagcttggatcttaggttcaagtagtctgtattaagtggcctgattctaccttgtgttgatgaaactggaagtttatcgattatctggagcctgcgtatgcatgaagtgcatcctcttgatgctacctcaacgtatgcagtttctcttgattctgtattgccgttctatgttgttttggaccaaagattagaatgtttgttcaaaaatatgagatcgttctatgtcgttctctagtaaatctttgtaggctatgtcatccaagcatgtttgtttggatgtatgagccgtcacacatttctttcctgttaattaataattagaatcagaagggaccaaataattgtacatctttggttaataatcaagtagaagtaattataggctattggagaaataacatagcataaaacctttacaagctttaaacctgcatcaacaacaagcatccatatatgtgctcacataatttacgccgggtcaaatcagcactgcacatagctagattcatggtttctccgcacttctgacacaatcaaatattcaaagttactacccaaagttggcgcatacttagttcacatgtagtactgtacttcataagttagagcagctacagatcgttcatctcatatgtgctagcttttcaccaccggtgtggcggctgttttcgcagctgcagcacgccacaacatggggagtgacgtatgttggtgccggaaccaaacatgcctaaaattttatgtttaggccttgtttagttctctctttagacgcatgtatggaatattaaatatagacgaaaataaaaactaattgcacaatttggtcggaattgacgagacgaatcttttgagcctacttagtttatgattggataatatttgtcaaatacaaacgaaagtactactattcctattttgcaaaaaaaatttagaactaaacaaggcctaactgcatcaacctaaactacagataatcactcttagatatggtagtccgctcaactgatccacaaagaacataactaaacgtcattacttgaagtggaatataatctcaccaaatattgtgaaaataaagggatatgcactgtagtattttcgttttatttcataattagtgtctaatcatggataaattaggctcaaaaaatttgtctcgcaaattattctctagctacgtttttagttttgtaaataatatatatttactactccatgcattagtccaaatatttaatgtgatgtgagttaaaaaaaatccggtgggatcaaacagggttggtgttaatcgaaatcatgtttgtgttcacaaggttgaagaaaattagtcaaatgatacccgatggggacatgcttcacctctctatctttctcctgcagcattgaactctaccctatagccaacatttttaaaaaagagaggctagagtgaggcaaactatcccattattatttttttttgcaaatcatttgacttgttttctagaaaatgacttcaattgtgtcttattttgcccggccactttatccaacctcatgttaagagagttgcaaaaaaattccaccaattgaaacacgtaaccagtggtgtgaacatgtatcattttatactacttgcgtcaattagttttggctgataagctatgataaaaagtaatgttcgttgatttgttgtgagagaaaaataccgctgaatgactgacagattcggctgataaactcaagcgaatagatctgactaataaatcgctcataatgattttgtcatctcaagatttgctaatttagtttatcatcagatgtatttatagactttagtatgtatgtgtgtaaatttgtagacatgcaataattctgagcaaatcatcaatcaatattgagaatcttatcctttgaagtactcaagtaacggggccaaacatacatcaaggttgtggccttctttcaaaaaattttcaagatttcctgtcacatcaaattttagagcacatgcataaagcattagatatagataaaaataaaaactaattacacagtttgtctgtaaatcacgagatgaatcttttgagcctaattagtccatgattggataatatttgtcaaataaaaacgaaaatgctaccgtaccgaaattcgaaaaaaattcggaagcctgtgtgtggttgccttgcatagccagctcaagaaacaagaagcttgctgggcttgggttagacgaatttgggccttatttagtttctgagaaattttgtaaaatttttcagattttctatcacattgaatcttacgacacatgtataaaacattaaatatatattaaaaataattaattgtatattttgtctgtaattaattggattaatcttttgagctttgttagtctataatatttatcaaatacaaataaaagtgctatagtgtttattttgtattttttttcaactaaacaagacctagatctctcacgctgataaagcaagtacatgtccgaacctcgctcgcacatgcttcaaaaagaaacctcgtttgacttctacacaagatgcttgttttctatcttaggtcttgtttagttcccaaaatgttttacaaaattttttagatttctcgtcacagcgaatattgtgacacatgcatggagcattaaatatagataaaaaatagctaattatacaatttgtctgtaatttttaaaacaaatcttttgagcctagttagtccataattagacaatatttatcaaatacaaatgaaagtgctacagtgtttattttaccaaaaaaattggaattaaacaagaccttgactgaacaaggtaaaatagtactctcttgtcgtccaaataaatcaatttttagaatgtgtcaaccaaactttttaaagttcgactaattttataaaaaaaataatatctataatataatatgaacaccttataaaaatatattttatgataagtctaatgatactaatttaatactaataaagtttaatattttattttagaaatataatcaaagtttaaaaaattaacctaatataactctaataacatatttatttagggatagaaggagcactggactaataaaaaatcaaatatgcctttatttagggatcgttatccttaagccttgtttagttcaccctaaaattttttaaaaaaatccaaattttatactacatcgagttttgtggcacatgcatatagcattaaatatggagaaaagaataactaattgcataatttttctataatttacgagacgaacttttaaacctaattaattaatgattaaataataattataaatataaaccaaagtgctacggtatcttgaacttttcacctaatctaaacaacgcctcactcgtcaagcagccccactcgccgagccccagttttttataatttggcccttttttgaagaaaattctcttttggacccctgaaaaacttaaactcagttttggacccaaggagtcgacgccatgcttcatggcgtcgaggttagagcaactccagcagggcccctactcaagccccaatagctaaatatgggtgcccatgctaaaaacattactccagcagggcccctactccataccccatatttggctgggcacccatatttctcctccagacccccattcccgttggcccaacagggcagcccccatcctccatcgtgtgttctagccccggcgcatgctccctctctctttacccttgcatgtgcatgacaccctacggtaaccggctcgatgctctagttgtgtccatgtccaaaggaagaagaaagaggaagaagaaaaagacactgacgagtgggtcccttctgtcattctctctggaataggtttgggggctcaaatttgggtgctactgttggagttgaagcaaaaaagtagatccccaagaagtaaggggagcacccaaattaaaaataggggcttagttttgggggctactgctggagttgctcttatacgcctcgacgccatggatcacggcgtcgagatccctggccgagcccagcgtggcttctgacatggcagatagctcgacgcagtagatcatggcgtcgagctcgacgccatagatcacggcgtcgagccttgaactacaaaccagcagatgcccttcgctaaccgtggacgcatttcatattttcttctcccctctcaactcttcctctccaaaaacaacgccgcagtaactttattgtaagttaatttttctattgtgcacttagtattttgtgtcctatgaagcatgatttaattttcttaacaaatatatttgttgcaaacccctccaccattgtgtgattttgagcagtagatcgacactgagattaaggaccacagctgccgctctcatgctccagcctctattcatgccccgcttcacattcacacacacaccacatctcttttttttctgatcataatactacaaaccaaggcataacaagacaaacagaagcatattaaaccagaaaggccgtgtgctccagttcaattgcatcacatgcttgtgcactcctagcacaatgtcacatccacattcagtcaagggcccaaaggcctggtactagttactgacaaaagattaacttacttaatcaccatgaaatcaccgtctccatgtccttgaagtaaagcatactgagtaactgcaacttatgggcctctggtgactgataagatcactcagtcagattaatcaacactaagcacaactcaccaaaagattcagactcaactctgctgccttttacatttctgtactccagatttgttacatggtttcaaagattggactcatctacgtaccaattcaaaacaaccagaatgatagataataatactgcaaatatctacatggtttcagtcacatagtctatacggtttaaagaggtaactgggaaaattgcttttctgaattcgatgacaatgcctatctgcctgttgaactatggtggatgatacatactgtacaaaatctaaatttctccagaaacaaaaggacaagaaaaagggcccagaggtgcacagaaaggccaaactgaggcatacgatgtacaccaagatgaccctgccaacctagcacaacagcatcagagttcttgccattgttcattgaatcttcttcagtttgataaaaataagcaccaacctccgtcaactcgaacactgcacgtgcagtcatttgagtagcgctcaaccacatcgaaccaagcatctggcgcactggcaatcggccggccaaagcagtcctgccatagcaattgagattagaagccaacaaggaatcgtaaataggtaaatgctgaaactgtaacccctcacatagcgggcattagaatatttaggtttatatgcatggttcacacatatctaatctgattaaagatttcataataacagaactctgtaacctgcagccggcgtgagacccgcgacagccggcgagctgcgccaaacgccggcgaggtcggagccctgccctcgacgacgacgccggcggcgggtgggaagcccggggacggccagggacgcgaccaatggccgaggacggccgggagcgcgacggattcccggaggcgcgacaacgacggcggtcacggggcgcgacgacggcggggatggggcgccggcggagggctgggagaggacggggcgcgaggacggcggcggatggcgcggcggcggaggcctgggagaggacgggcgcgaggacggcggcggatgggccgagggcgccctgatatgtggcgtcgagcccgctgccacctgccatgtcacacgtgatctggccagtgacagtaacctcagcagcgccgtgatctatggcgtcaagtcgtgtaacctcgacgtcatgaagcatggctctatggcgtcaagtcgtgtaacctcgacgtcatgaagcatggcgtcgaccctctaggtccaaaactgatattaagttttctaagagtctaaaagagaaatttctttaaaaaaaagaccaaattataaaaaattgggtcgtcgagccagggaccaagcagcgctagttgcttttaacataggtcttatttagattcaaaaaatttttagattttgatattgtagtacttttgtttttatttgacaaatattgtctaataatataataattaggttaaaaaaatttatctcgcgatttatagacaaactatacaattagtttttattttcatttatatttaatgcttcatacatatgttgtaagatttgatgtgacaggaaatcttgaaaattttttagtttttgatgaacgaaacaaggccataacacagccttgttcatagagacacgtctcaggaattgttgagttccaaaaaatttcaaatttttttatcatatcgaatttttcgacgcgtatataaagcattaaatataaat

SEQ ID NO: 4941 - DNA, 5808 bp, Sorghum bicolor
acaattactacttaaaatcaaaatatttatctagttcttgataaaaggggaaatcttaataaaagaccgcttactaaaatgaaacaaaaaaggataagatagatgtttttgtgaaaaaaaacatttagcatttgttctttgattatcgagttgctagatttgtttggagagtctgtcaagtggcattaatttcaaaccacaaaaagatgtatctgacttatttggggtgtgggaagtacactctagtctatttgactatttagaaatattaggatttatgataaaaaatgactatacttttatttgtgtgttgttttgaggataatttattggacacatttctagaaccctatgcataagaagaatgacatgccattgttgaagtggacatgtcacgtgatggagaccgtggctatgaaaatctatatatcctataaagacaaaccccactaagctaattctcttgcatctccttgcgccacgtcatcatctacttctactgccgcatggaattaagggtccactcacaaatggtttcagtagtgaatataactacctacacataaccctacatgcatactgctagcaattattctctcacgtgaccttctctcttcctcttcagaaattgactactaaaactttttttgcgagcaaaaaaaaatttttagtagtcaatttgtagatgactcgataaactacagtaaaatcatatttatatttcttcttcatacccgcggcaacgcgcgggaaatcctcctagtatttgccaatcatggatggttgttggttaagaggtttagcatttatcgatcataccttttgtttggcattgagtttgagagtttttctaaaaaaaatggaggctctaactgtagtaaggagtggttataggcaaaactcttgctgagatcataataaactttcttttctcatttttattgttgtgtgttcttgaggaacacaatggactactttggatgttatagctttggaacctccagatgagaaaaatgatggtttacagaaaaatagttgaaggtggagtttctaaaacactaaaattaatactcctttaattttttttacaaagtcatgtttttttaaaaattataaaaatattttgcatccaaacataatctaagcgtatgcttatatgcacagatactaaacctatgaatgaaggccctgttctgtagtattaattcaataatacttttctctcacaatattttagcataagctaaattttagcgaaatgaggaccgatcttatttggttctgcattagcgacgcgtttcagcaaagaacatggaaacccaccgaatggtttgtgttggacccgcgtggggcaaccacacaaaatatgatagtggaaccaaacagacgctgaacttattatgagtgtctagatatggatacttgattttccctatttgatataagatcaccatttgttgttcttatcagataaataatttataggaggtgaatatttaactctacgacgtacttcctctgtctcaaaaagaccgatattttttactttgaccaattatatttgaccactcgtcttatttattttttttttacaaattctaaaatagataaatcatcattaaagtacctctaataattaaataagttatatcaaaatagataatatttgtaaaaaagttataataaaatagatgatcaaacaaggtgtccgaaagtcaataacagattatatccaatccaaactgccatcctggtccgtccgatcatccagaggagagagaaaagaaaaggccaggcgcagagcatataaagcaggcggccgggtagactgggagagttgaccggaaagtccttgggtttccgcgtcccggcctcacacctcactcagcacaccacccgctctcgcgggccccactgggcccccacacgcctttgaaaactctcgtctcgctttctaattccacaccggcctggtgcctgccctgctcgctcgctcgctcgctctagtcctccctccgactccgagacacggagtcctcttccctcccctccctgaacctacagcttcgtcgtcaccccgccggcgctcccttcctcccctggtccgcccggatacaggttccctcctgagcgcgggaagaagttcccggtgagcacccatggaacctgtccctccctcactctcgtcctctcatcgttttcttttcttcttgtggtttaattatcatcgttcttgcaaaatttgccatggtcctgtacgatcttgcatgctgtggtctgggcgagggttcttaaattcgagaggacctgtcagccgtggcgacgaaagcgatcgattttgtgtttttcgcagagaactgtgctggaatttgggagagaattagaaaccctgtgcatggtgttcgttctagcggtttgtgtcctcaggaggaagggtttgccgcaatcaaaagtgcttttttttaaagaacgacccagcgtgtgaaattagagagaaagacggaggagcatgggctcttatggtgcccgctttcgggagatctttttctttagatttttttttcttcttctgaaaagttgtgcgcctttagttgcggttggagccgtttatgttgggcatgagagatcaatcaagagactaaattagaaagccttttgacagtttttataatataggtaggatcgaggatttgttcatgatctgcctctcgtttgtttttgttgctttccatgcatatggctgcacttcttctttgttgcaaaaaccttaacaaaagttgccaactcgtgttatttgcttgcctctagtggggatcggttctttaactgatgtttcctgtgtgtggttcacattatttggcgttgccgatatcacgtttgaatcgaattttgcattttaggtagtggaagagagaagttgcatagcgacttttaggtccccatatggttgctgtcaccatttaccaattagtatatgtctctcttgtttattttattttattcaaagtctagcgtctctaagtctgtgcgttcgaatttgattttgtgtaggtgaagcttgaatcgagaagtggtgttaacatcatcagggagaagttggattagtccgccaaagtgctcgatgacagatcattttgctctaagtctaggtgctctttttctgttgttgctaagtaccagtggtttcagctctgaacttgatgtccaatgcttgagagacgttcagaaatcggtgattgatccaaatggtatactcaaatcctcatggatttttgataacagcagtgcgggtttcatatgcaaatttactggtgtggagtgctggcacccagatgagaatcgagttcttacattgcgcctcagcaaccttggtcttcagggtccattccctaaaggtcttaagaattgtaccagtatgactgggctggatctgtcaagtaacagctttactggcgtcatcccttcagacatcgagcagcaagtgccaatgttgacatctctggacctctcctataatagtttctcaggaggaattccaatacttatttataacatttcatacctaaacacccttaatcttcagcataaccaattgagtggtgaaatcccagggcagttcagcgcccttgctcggttacaagtgtttaatgttgctgacaaccgactatcagggattattccaagttctctacggaacttctcggcatcaaactttgctggtaatgaaggactgtgtgggcctccattaggtgactgccaagcttcagcaaagagcaagagcactgcagcaatcattggggctattgttggagtggtaattgtcgtcattattggtgcaatagttgtgttcttttgtctgcggaggaaaccagccaagaagaaggcaaaggatgaggatgataataagtgggcaaagagtatcaaaggaacaaaaactatcaaggcaagtcattaacttatcatttgatttttctttttcttaggcacataggcccaaatgcaatttcaaataacatttcacacaaaaagtaatcggagacttatctctgacatgattatttcgattattatccaggtatctatgtttgagaatccagtttcaaagatgaaactaagtgatctcatgaaagccacaaaccaattcagcaaagagaacatcattggtactgggaggacaggaactatgtacaaggcagtgctacctgacggttccttcctagctgtcaaaaggctacaagactcgcaacattctgaatcacagttcacatcggagatgaagacacttggtcaagtgaggcaccggaacttggttccgctcttgggattttgcattgccaagaaggagaagttgctggtgtacaagcacatgcccaagggctcactctatgatcagttaaatcaagaggaaggtagtaagatggactggccattgaggctacgaatcggcattggtgcagcaaaagggcttgcatatctccaccatacctgcaatcctcgagttcttcaccgcaacatcagctccaaatgcatcctcttagatgaggatttcgaaccaaagatatcggactttggccttgctaggctcatgaacccaatagacacccatctcagcacctttgtcaatggggaattcggagaccttggttacgtggcaccagagtatgcgcgtactctgatggccacgccaaagggcgatgtctacagctttggtgtggttctccttgagcttgtcaccggcgagaagcctacccacgtttcctcggccccggagaatttcagagggagcctagtggaatggatcaattatatgtccaacaacgcacttctccaagacgctatcgataagtcgctggtagggaaggatgctgatggtgagctgatgcagttcctgaaagttgcgtgttcctgcacgctcgccaccccgaaggagagaccaaccatgtttgaggtttaccagctcgttagagccattggggaaaggtaccatttcactgccgatgatgacctggtgctgccacctcttagcacagatggtgatggtgtaaccctcgacgaactcattgttgccaagtaattgcaaaattcatatgtcgcagaagacaaaacaagactgaatgtcttctcttttttttccccctccgagggaattagtaatggtgaagtgagtatatgtagtaccaattagtagcaggataatactgcatccgctgtatagttgttgtagcttggttgttacccaccctttggagatgatagtagctgtaaaggataatttccatgtaaccaatttgggggctaggttgttgttacttgtaagtttgttacccttgtgtcatggggtttccctgccatttcacagtactacacttgcacgttgtcgtaggagctcacggtaagattcttgcactgttccctgcacctggctgcataggcatctcgcagggcagaggtcagtgttttgtgaaggagcactttgccagttggaaactattctggtccaagaccaaaaagcccggtcgtgcgtgcacggcagacagtcaaactttttgactctgatcattgagggcatgtttagtttctaaaaattttctttttatgctatcacatcaaatatttgtacgcatacatgaaatattaaatatagataaaaataactaattatacagtttatatttaatttgtgagatgaatcttttaaacctaattagtttatgatagacattaattaccaaataaatcgaaaactttgtagtagttaaatctaaaaattttcgcgaactaaacaaagcctaatttatggggcagtac

SEQ ID NO: 4942 - DNA, 4061 bp, Sorghum bicolor
tgaaaaggataccagaagccagcgtcgtagatacaatggaagcttttgctgtcaacgtacatatgttatgggagcggcaggacgaagagcagcagcagaagctgaaagctgactacctctctagggatttcgcaaagcggctcaaatctcttcaggaggaacatggcttgcaagggcaatttgaagctgacaaggcagtgttgcccattgccgacaatggcagggcagtcgataaccgcatggttgcattggatacactgcacaagagattggatgaacaaagagctcggcacgacgaaactgtgaaacagattcgagaggccagtgcagctgatctgaaagcaggtctggctccgatatttgaagcactggaatctttcagtgtggagacgctgaaaggttatgaaaatgtcaggattccagtcgaaggtgttggtggttgatatctttaagtccacaaattttctgttggcagctcttgatacctgaagtccacaatgatcgctggggcagtggacaatgttgaattcatccaaggagctattaacaatctgaaaatgtcttcaatttgccagccatgcgcaagcacaacaccattgtacttggaataatgttgaattcatccaaggtacaagcaaggacggcccagaagttcctgcatgattctgcactaagcaatgttaccacggattctttgagatgattctggtttctgaggtagcaaattcatgtggaccttctacactagtcagtagctatagctacttatccacagagagctgctaggagcctgaactctctgtctagttggagcccctcaaaggaggggaaggcaattttgtagccattttcagctcctgtacatattattagctaagttagtgagttcgcagggttagcacgtcatctatgtacaatttgatctgtgcactgtataagttgtatttacgcccctatgtttacggcatgtagatggtatgccccttctatggtgttgcctgctgaagactgaagtgaagagcatacaatagatgttgggcgaatgtcaccgtagtagttgcttgcgctgtctgtctgccttccaactcgataacccacaaccacaacaaagttttgccagtttggtcttcattttgttctaaagccggcactggcagaacgcaactgctcacctgtaatatggctgcatccagctaacgtaacaaacgtacagaagcaaaaataccaacatcaatcaatgagcagcttagtctgatcggttgcttcgcagatgatcaatcgtgcacacacagtacaactgtacacatggacacatttgtttcgagggtgccagatgaccagatcggatctgttctgttccgaaggggatggatggatggcatccaacggaggttttccaaataccacgttaagtatatatcggtgacaaaaggctgaaagagcattctccatgtgtaggttttctgcatcgccaatctcgaagccatgcgagttactggctcacgtgctctagtctaggtcgcgtggaccaatgctgcgaagtggccgccgggccgtgccgtgccgtgccggtgagacaaaaagtgaaaaagcgctttcaaaacaaacagtttgtttggggttgcacgggcccagcattccaacctgtttgacacgtccttttttttctttcccccgcacggcgcaccaccggctgacgagcacggccggcctcctccacgctccgtcccgcggatccggtcccgagcgcatcctctggatcggcacggaaagtggcccgtacccagacacgaagcccagatcggcacgcagcggcccgaatgctcatctatggcctgcaggattctggaaaaaaaaaaaaatctatgccctgcagggtgccgggtgcagcctcgaacatgtggtgctggcaggccggtcgctgtgcgtcaaccaatcaccggccccctccctcagccacccggggcaaagatatacccatccgcaagcctgtggacgccagggagtagtgaacaccagccgtcttgccccgatcctcacctgctgctgcagccatggcgaccaccgcggcgctctccaccgccgccaaccccacccaccaggtgacccagcaacttcctcatcttcttccttcttctgccatggggcgcctctctctccctgaccttgagttttggccgacgggaaacagagtcggcgtgttattagttttcacaatatggttttttctttgcatatatatgatatatgatgtcccgtgtccgtgcctgcaatggcagctctgccggtcccgcgctacgctgggcaagccagtgaaggggcttggcctggggatgggccgggagcgcgcccagagcatcacgtgccaggcggcgagcagcatccccgccgaccgcgtccccgacatggagaagcggaagctgatgaacctcctcctcctcggcgccatctcgctgcccaccgtcggcatggtcgtcccctacggcgccttcttcgtccccgccgggtgagtcgcgttcgttgccatgcatgcatcaacacctagctaccggctcactgtagctccggcggcccattggttttgcacgcatcagctccggcggcgccggcggcgggacctacgccaaggacaagctgggcaacgacatcacggtggatgagtggctcaagacgcacggtcccaacgaccgcacgctggcgcaggggctcaaggtcagtcatcccatcgccaccgtcgtcgtcacctgcagttgtgtttgtgtttgtgttgatgatgctcacggtcacggccggcgtgttttgtgtgcggcgccgcgtcgtgcgcgtgcagggtgacccgacgtacctggtggtggagcaggacaagacgctggccacctacgggatcaacgccgtgtgcactcacctcggctgcgtcgtgccgtggaacggcgccgagaacaagttcatctgcccctgccatggatcccagtacaacaaccagggcaaggtggtccgtggaccggcgcctctggtataaaaacaaacgcacccaataatttcattttcttctaaactggaagtctgcagctgattgtgttgcgtttcaactgaaactgatctgcttcggcgctgctcttctgtgaacagtcgctggcgctggttcacgccgacgtcgacgacggcaaggtcctcttcgtcccgtgggtggagaccgacttcaggaccggcgaggacccgtggtggaaggcatgaggaggatcccacaccagcggtgctcagtgctcacagatgacctatgtatggtgcctcctgtgtcgctgtgatgaggtcatagacttgccttgcgttcgttctccaagggcgtacaaactcacttgcttcttgcctccaaattatatatatgtacacaaactgtatgaaacaccaacagctgtttttcatctcttcatatactgtggccatttggatggttgatgctgctgtgaagcatacatggtcgatatctggattgcaaaaggattaagagggtatatatgttatataaataatctataaaatgtcagacggtgaggacgattggataaccttggtatacatggcggccagtggcggatctagaaacggaccaaggggggctaaagaacaaggcgaacaaaaaattttgctcggtagacacagtatactagtagatataacctagattgataatgtgatatggattcaaagtagttaaagtcaaagatacatagaattaaggatagaaaagtaccaaatacaaggagtcttccagcttaagaattggcaccacttgaaccaatacgacttgaaccgccaccctcaatgctacataatttgcaaatgtcatacacttcttcaataatcaagataacaagtaaaaagaaaagtattaaaacaatacgcaccttgggaccttgaggaaattcatcaattggctttctaagacctggatcagcaactatatcattcatatcaagctcaatacggggtcttttttctcaactcgacactctttactggaatcatctttcttagaaaaatatttttccattctacaaatt

SEQ ID NO: 4943 - DNA, 6653 bp, Sorghum bicolor
tcaacccaaaatccaaaaacttttcaagatttcccgtcatatcgaatctttagacgcatgcataaagtattaaggccctgtttagttccccacctaaaattttttcatccatctcatcgaatctttgaacacatgcatggaacattaaatgtagataaaaaaataaactaattacacagtttagttgaaaatcgcgagacgaatcttttaagcctagttactccttgattatacttaagtgctacagtaacctatatatgctaatgacagattaattatgcttaatggatttgtcttgcagttttctaacgagctatgtaatttgtttttttattagtttctaaaaaaaccctcccgacatccttccgacatatctgatgtgacacccaaaaaaatttcatcttaaacaaaattaaaaactaattgtacagtttggtcgaaatttacgagacgaatcttttgagcctagttaatctatgattggataataattatcacaaacaaacgaaagtgctacgctatctgaaaaaattcggcaacaaactaaacaaggtcttactcctagaaaactcggctcgccacggtcgactgtagtactgtgcggtattacagactaatggctgcagtaaccgtgtttgacggtagttacgtctcgttcgtttgcctgataagctatgataaaaaatattattagctgatttgttataagataactatatatattattattggagaaagacattgtttggctgataagctatggtaaaaaatattgttgactgatttattataagataactacatatatatatattattattggagaaagacaaaaatatatattgaatttttacctatagggttatctaaaggacggacgagtcttgtattttgtgtcacagtgttagagacagtcttggaggatctccgcagatagctatttgactagctagacgtaagtaaaaaaagtacaagagaaaataatcactaataataaataaataaatagctgatttatatttcacaaagtacaaaaatctatgagagaaacaggtgattcaaatagtatataaaaaaaataaaaatatataaaatagtttttacttatgtccctcatcttcacattagctaaggccttgtttagttcacccaaaaaccaaaaacttttcaagattatctgtcacatcgaatcttacggcacatatatagagtattaaatatagatgaaaataaaaattaattgcacagtttatctgtaaatcgcgagacgaatcttttaagcctagttactctatgattggataatgtttggaaaataaaaataaaattgctatagtgtcaaaatctaaaaacttttcggactaaacatggcctagttagcaccattacataggctcgtacctcattcgtgtcacctgatattattattaatgtattcccatgttcaatttactagtagtactatactaacccctgctactagtctagtaccaaagtactctaccaaactactactcgtatgtggcaccacagtattgtactttcttgctcggctctgcattcggatccaatgtgaatggcgtgctattgcaaagtgctcgtttcgtgcttgggagttgagactgcgctgaagcgaacgagagaacgctcctgctctgctcaataataaacgcgcgtctcccacagcggctccacgtgcccgggtcacgctgccccgcgcgcgcgcacacgccgctccctccccggcttcctcttcgcactcgccgctcgccaccctcgccttcgcctcgcccaccattttttacgttgccacgctacttttgcttccggcccctgctcactcggtcactctgctgtctgctctacctcgactcgaccctcggttttctgcgggagcgaccgctcgcggcgtcgcggcgggtggcgagggcaatgccaatgccggcgccggcgagggagtagtagggggcggccgcccagggacggagcggaggtgagggatggggtgccggagctcgcggctggacgcgacggacgtgtccccggcggccgcgctgtgccgggagcgtcgggacctgctgcgggccgccgcggaccaccgcgcgcacctcgcggccgcgcacgccgcctacttccgggcgctcccgcgcgtcgccgacgcgctcgcgcggttcgcgagccaccaccacgccgccacgccgccggcgccggggtcgcccgtgctcacgctgccgccgccgtccgaccacgacgacgccgacgacgccgacgagcccaagaagcagcggggcagcggctcagcgacaccgcataccgactccggccactcccacatccacttccactccgacgacgcctcggaatccgatcccgactcctcggccgacgacccctgcgccggccccggaggctgtggcggcggtggccacggcgccgagatcccgccgcagacggcgcctgtccttcgtcctggcgttcccttgcccaaccacggccacggtcatggcgagccccaagaacgccaaatccatgaccctggttttgttgccaggccggagatgccgtgggagtacgcctcctacgatccctatgcttcctttccaaacaccgcattccaaaatgccacatttcccagctactactacatgaaggccagcttgacgccggcgaacacggtgtaccaagaaccgtacggctacggcaacttcgccaccagttcgtcctacatggggtacggctacgggtacaacaacccaatgtacggcgtctcgttgccaccagacggggatcggccggtggaggatcgcggccgggaaccggcgccggcggctccggcggcggcgccgccgccaatgccaatgcctgagacgacaccgtgggacttctttaaccccttcgattcgtatgagcaggaacttcctcagtataagggcaaaggttacgactccaatgggtcgttcaccagcagtcccaactcaagtgaggtgagggcaagggaggggatcccggagctcgaggaggagacggagctggagtctatgagggagtctgtgaaggcaaggaaggctgtagagagcacggcgtcgaaccggattggcaatgtggatgtcagtgccaaggtaaaagtgtccatggagcataaggaagttgagatcgagagtgtgtatagtgcttcggtatttgagtcaggggacgagagtgtgtgcagttgcgattgtgaccatgccaatgctagaacagaggggtcagtgcaggtgccggcaggagatgatcaaatgaaggtgaggaaggtgagctcagaggatcactcatccatagtagtcggagaggatgcacggccgccagagttcactgggacaagagatgtcgccgaggttgttgaggaaataaaggagcaattcaaatcagtggctgcctgtggggatgatgtcgcaaggatccttgaggtggggaggatgcggtatcgatcacggaatagaatcttaagatgtaagtatgctttgtttttcatttaaccattgcaaatcctggttccatcaaactgaagccaactttgtttgcattggtaaatcaatagctatattgaaatttgaccatttgagaggtagaatgtacctggtttcttattgttatactgatctctgggctggagttcttctctgtccttccatagacaattgtaacccagtcaaacaatttgatccttactctccatgcagtgatattctcacggatgatggggaccttcgctttgttattttcttccatatcggagccaccggtgaagagcttggaagaatcagctataaatccatccaaaggaaaccagaattccagtaaaagattcgattttcccagtgatgttgagcttaatactctttcggcaacaatggacaggctgtatgtgtgggagaaaagacttcataaggaaattgtggtatgctattccctttatatgaaatgtggggattagtttctcttgcagatttatggtatctttttttttgttgatctggcaaataaggaaagatgagtatagttgacttgtccctccgtcttgatatacaaggtatcctaggaattctaagaaaaattatgggataataaagcaaataatgcttgtaaccctcccttaactgtagagatacagatatattattgtgattactatatttgagctatattattattatcatttaaccactgcaaatcctggttcctttgggaatgtattgattggctgtaaatggttaagaagggcccttacttagagtaatttgtttgtgaactttaaagtgacactctgagcctttatttttcatcaacatgttttaacatttccttaaactatgttaggaggaagaaaaattgaggattacatatgacaaagaatggaagcgcttgaaagagctggatgctagtggtgcagagccacataagatcgatacaacgcgggcctcaattagggcactgctcaccaaaatcaacatttccatcagatcagctaaagttatttctaggaggatccacatactacgagatgatgagctacacccacaccttgttacacttatccatgggtatgacagatgtaatccaccttctactcttttattcactcccgtagatcttgaagggttcaaccttcaaacaatcatgtctttgaatgttatttcgcctgttaccctttttatcgtttcatgacttttgatttgctttacaaagtacttacggatttcttgactataaaaatcaatgattcttatagagtagattttatattattttttgaactgatgattctagtactagataagttttgtttgtttaagaaaatatgcagttgttcagttaatatttcatcgattgtgaaacaaatgaaaaataaatatgcaattctttgatggaaaatcactaaaagtagggacctgttgcgactgaaaacttctatatgccatctggtccattttattgaactggttttctgtgatgtctaaatacttcatgtaaactagagtagcatgttttatgttgctgtattactacaacatgggattgtgaaacaaatgaaaaataaatatgcaattctttgatggaaaatcactaaaagtagggacctgttgcgactgaaaacttctatatgccatctggtccattttattgaactggttttctatgatgtctaaatacttcatgtaaactagagtagcatgttttatgttgctgtattactacaacatgctgttttttttaaaaaaaattatatattgttgcataagttgttgccacatttgcaaagatcagctagttttagtagtagcgatgttctttttaaaaaaaaaataaaataaagaatagttctgatttttgtgcaggcttgttagaatgtggaaattcattcttgaatgccatcggaagcaatttcataccatacttcaaactaaatctcatattctgatccctaagaatggacctgaagaaagctcctccaaggttacactggagctagaaatggaacttttgaactggtgttcttgtttcaggaactggatcttatcccaaaaagcttatatcgaaaccctcaatggttggctagtcaaatggcttcctcaggaaaaggaggagactccggatggcattgcacccttctctcctggtaggcttggagctcctgctgtgttcattacagctaacgattggtgtcaagccatgaaaaggataccagaagccagcgtcgtagatacaatggaagcttttgctgtcaacgtacatatgttatgggagcggcaggacgaagagcagcagcagaagctgaaagctgactacctctctagggatttcgcaaagcggctcaaatctcttcaggaggaacatggcttgcaagggcaatttgaagctgacaaggcagtgttgcccattgccgacaatggcagggcagtcgataaccgcatggttgcattggatacactgcacaagagattggatgaacaaagagctcggcacgacgaaactgtgaaacagattcgagaggccagtgcagctgatctgaaagcaggtctggctccgatatttgaagcactggaatctttcagtgtggagacgctgaaaggttatgaaaatgtcaggattccagtcgaaggtgttggtggttgatatctttaagtccacaaattttctgttggcagctcttgatacctgaagtccacaatgatcgctggggcagtggacaatgttgaattcatccaaggagctattaacaatctgaaaatgtcttcaatttgccagccatgcgcaagcacaacaccattgtacttggaataatgttgaattcatccaaggtacaagcaaggacggcccagaagttcctgcatgattctgcactaagcaatgttaccacggattctttgagatgattctggtttctgaggtagcaaattcatgtggaccttctacactagtcagtagctatagctacttatccacagagagctgctaggagcctgaactctctgtctagttggagcccctcaaaggaggggaaggcaattttgtagccattttcagctcctgtacatattattagctaagttagtgagttcgcagggttagcacgtcatctatgtacaatttgatctgtgcactgtataagttgt

SEQ ID NO: 4944 - DNA, 4979 bp, Sorghum bicolor
gcgacaagacgacatcgatcacagtcatcagaaattcggatatgtcttcgccgtcgcatgcagcattatttgtgcagctcaaagtctggatcgctgtatacaatctgcaggcccgtgagatgacgacggttttctttttcgtcttgacgctaagatgcacacgtgtacgcatatgtacgtgcgtgtgcatgctctcgaacaagatttgtgggcaaaacgacgactgaaacgaaggataccgtgggcgttgcgttaggtgtccacgtacgtagacgagcgttgaatggcggccgtagaagaccgatgatggccagtaaaatactccttccatctagttaacggccggccttcttgccatgtacgtctctactgtacgtacgtgcatacagatcctcgatcggcatcgttcagtatttatttagcctcaaagaccacacaggctgctgatcattcaggagtatcatgagagatcactttgattgagattttagagtatcgatcaagtgtagttgcccagaatgatctgctgctccttcaggagttattagtgcctgacggtatcttcagtcttcagaagtttcgaagggtttcgcacggatccaactcgaaaaaacagaatgataagagactaagagctttcccgaaacgaaaagggctttgcttacactaattctaatcgcgtcatttgcattgcctaaataaaacaggcaacattttccataaactaaaaggatattgttgagactaaaatggcctgtgtcacacgagcacgtccctatacagccactacgacagagaagctagctcatatggcgcacctttcaacgcctctgcgaaaactggcccaaccgcgactatatattgtccattaatttgccgacgcttgttcgagagggacatcatcgataaaggtgcaccacggtgtgtcctagattcgacagacctggtaggtgccttccatgccatagagacaagagaagaacaaacacatagggttggagaagtaggataaagagatcaatcgaaaattttgcattgacaaatgcaactgaattgaatgcgctcaatagggctggccctttgtatttgaaggggtcttgcttgccccattaactcttacaggttccatatcaaaataactctaaactcagtttaagctgtcattcaacacccgcctgcatgccgacttccacgggtgtggatcttccaaaacccgcaattctctcattccgtactctaaattgggttttctatctgtgtttcataatggtggagtctaattgcatcttctgacaaaagttataaaactggcctagttggtttaaagaaaaaaacagccatgccggtttttgggaacacccggccggatggaccaatagatgcgaacacatactgaatcaagaaaacaaaagcacacgaatggatgcttggtcagtataagttcaatgagctagtggaccggacgctggatccatcctgatcccaaactctctgacctctgtggtgagaagttagtgagaacctccggcatctcattctcatcatctgatagtgctggaagcaaagccacactgctcactgccccggcgcaccacttctgcactccggccggggcacttgttttcagtgggtggtcaagataagaacgcaatcaatgaatcaatgggtgcaggcatcaggcgctctacccctggcctggactggtctcacaccagagagagatgccctcctccctccaactcttcctatatatacatgcaaccatccatgtacccgtccatccacacaaacatacaacactgttgtcatttagttgttcttgctaggcagttacttacattcagcacctgtctaaggcacatctatctcctgcgtgatctgaagatcagaccagcttgttcagctttgccttgttctagcagttgagaagaaggtggtttcatgaagtgcaagcacacaggaaagaggcaaagagtttgagataagctaggttcgaacagatggaggatgtggtgaagttcatctttggaatttgtggtgagtgtgtgttgcagctcctcatatgtgtcctcactttgatgatgatgctcttgttgtggttcttttacttactgtatttttgttctgggtttcaggaaatgtcattgctctcttcctcttcctatccccagtgtaagtatatactctatgtagcacaatctatgttcctcgattttggttatcaataagaatgggcaaaatcacagtaaaaacattccaatatagactgattatattagttatctctgagttatattgcagttcatatatacagacaaactactagcatgcacaactttacttttgcctatgcaaatataaataagatgtactgtagtacccaggaacaagctactccatgaataattgtaggtgtatgcgtatcctattttgcttcattccttttattattttaagctggaaacatccagcaaatcgtgccaccctcgacgacgtactagatgtcttcagcttaatttgtccctttgcgatattccattcatctactcgaaacacgttgcagttcagctgttaattctccaactgagacatactgcttaaagctttaaactgatcgatgatctgctgaaactttttttcccccgtttttggctcacaggcctaccttctggaggatcatcaggaggaggtcgacggaggatttctcaggggtgccgtacaacatgacactcctcaactgcctcttgtcagcttggtaaatactgctgctcgatctcactttagtttccagatcgagtaataaaaagtatactcgcttgctaaagaacagtgaaaaagggcgaatcatatacacacacagtactaccaccactatgctgaacacggaattttccctagtattaaatcgcgtcaatttgtagtattcaaaaccatagatcgcttccatcatgaaacttgccactagtcgtccagacacataaaaagcttgtcggtgaagcgcaccgaacttattagtagatgtcagtccaggatctactagacaccacgggaatggtgttgctgtctgccctgtctgtgtacgtttgttgcctgtctggaagggacagtgcaaggtggtgacgaaacgcgaacaggggagtagggagcatcaccatcgtcgtatctgagccgtgtcgctcatccagggccagggctcacaagtgcgtgtgcgtgcaggtacgggctgccgttcgtgtcgccgaacaacatcctggtgtcgacgatcaacggcgcgggcgcggcgatcgaggccgtgtacgtggtgatcttcctggtgttcgcgtccagccagcggacgcggctgcggatgctgggcctggcgtcggcggtggcggcggtgttcgccgccgtggcgctggtgtccatgctggcgctccaccagggccagggccggaagctcatgtgcggcctcgccgccaccgtctgctccatctgcatgtacgcctcgccgctctccatcatggtacgttctcatctactatcggttatatatatatatatatatatatatatatatatatatatatatatatatatatatatatatatatatatatatcgtcatcaggcaactttgctgatcgaatcgatcgactgcgtgtgtggtgcatgcagaggctggtggtgaagaccaagagcgtggagtacatgccgttcctgctgtcgctggccgtgttcctgtgcggcacgtcctggttcgtctacggcctgctcggccgggatcccttcgtcgcggtaagcacggccgtaacgccaagagttcgtctcgtcactgtcatctgatgacctccttaattttgacagggaggcatatatgtagctactaggcatgtaataaaatttgcagctactagtagtagtagtagctgtaacttctaggtgtttgatgcgtcgatcggttagccgttagagtttcgtcgtctccgcctctggttctggatcgatgcccttgacttgccgatagatgtatcatattcgagcaagggccgatcgagtgcaatgccccaactggcaaagcacgcgcgcagtctgcagccacatgcacgctgcggggtgccaacgtgcgtggtcgagagttatggggcagtgcccaacaagaagaggcgaggcaacgcccacgcgcgcgctgccgccgccttcaattgtgcacgcctagcttatttgccaaatcaaagtggtagtatgtgttttggactgacgattattgaataccatacactcatactcatcgatgcgtacatgcagatccccaacgggtgcgggagcttcctgggcgccgtgcagctggtcctgtacgccatctaccgcaacagcgccggcacagctggcgccggcaagcagcaggccggcgacgacgtggagatggccgccgacgcgaagagcagcaagaaggtcgccgacgacgtcggcggcgccggcaaggagggccgcctggtctagctcggaggagccacttcggtccatggaatcttcgatctgcttataacataatactcctgtaatagtaggccagcaccaggacagcaagtgtgttccctctcccctgcaaatcaaccgttctcctcgatctcccgtgattgtgtgtacctgcgtatacgagagtacgtgctgtagcatatatactgtaataatgcaactgggttttttgtgtttatttacatgtaaaacaagtcaatcaagtactacaggcaaatgtattagttttgggatggattaagtatcagtttgggtaagaccctcagatactgcttttggtctcctagatcaaatgtcacgtccacgagaccacgacagggcgacaggtgatgccatgacgctgcaaggcaaaggtcccagggtaacgggctagaaattagctcgaggcccaacaagttttgcgctgaatgtacaagcccatgctcgcaagtgggactgggacatcttgagctcctggcaattct

SEQ ID NO: 4945 - DNA, 2641 bp, Sorghum bicolor
gcgttcgagcaggaggtgttcttcgccacgcggcgcgggacgcggatgctcaacatgtccgacttctgcgaccgctcccgcgccgacgcctgggacttctccgccttcgtccgcacctacgccgcgtacctcgacgaccgcctcgagtgccggatgcagggcaggcagcagggcggcggcggcggcggcgccgccgccgcgcgcggtggtggcaggccgctctacgaggagatgtacgcgtcccccggcaaccgctacatctgcgacgccgcctccttcaacgggagacaggaggacgcggaggcggacgccgaggcggctcacagcagggcggcggtggcgctcgtcaccagggacccgcccacgagcgagatgacggtggatcagctgctcgtcaaggccaaccagctgcatcatctcctcgaccggttcatcgcctgccgccctgtaggtgagtgtgagtccgttgtctttctcaagttggatcgcgcatgtcgacaatgccccccggccggtgcatgcgttgacaaagctcaccttcgaatggcattgtcgtcacaggcgcggcgaaggcgaaccgggtggtgacggtgtctctgtacccgctggttaaggagagcgtgcagctctactgcgagctcaccgaggtgatggccacgctcatcgagcagttcgcggagatggagaccgcggactgcgagcgggtgcacgccctcttctgcggtctcgccaagcagctggaggagctcgagaatttctacgcctggtgcaaggtcgtctgcgtctgccgccagtccgacgtcccggaggtggaggtcgtgacgcagaagaagctggaactcatggacgagttcatccgcgacaggcacgccgccgcggactcgcagcagaggctcccgccgccggaaccggagccgatggagagcccagagccagcccccgtcgaagaggaagaagaggacgacgacgatatgaacgccaccaaggcacttccagcgcccgaggagccgccggctgcggagcaagtcgagccagaggccccgctcgtcgtggccgatccggtcgaggaggaggccgacttcttgaacctcaaggcggacgccatgtccggcgaagagcacgggcagcagctggcgctggcgctgttcgacggcgacatagccggctcagcgccgaaaggcaacgtgttccaaggcacttcggcggactgggaaacggagctggtccagtccgcgagcgcgcttgcgaaccagcgcgccgagctcggcggcggcctcagtatgatggtgctggacgggatgtacaaccatgcggcggtggccagcaacgcacagacgttctccggcagcgccagcagtgtggcgttgcggccacccggggcgccgcccatgctcgccttgccggcgcctccagcgggaggcagcagcgccgcagtaggtgcagaccctttcgcggcgtcggcgttggtgcctccgccgacgtatgttcagatgtccgacatgcagacgaagcagcaacttctgacgcaggagcagcagatgtggcggcagtacggcaacaacggaatgaatcagggagccttggcaatgctacagcagcggccaaaccagaatcagcagttcctacctcacacggggcacaattactcggggtatcgaacttcttagatcaatcatctgcaaatgtggttttccacatctccagcgttcgaaacaaaaaatgctcggggtatcagatagtcaaattctatcaaattctacaaggttcgaaagcggcagtccaatattgcttatataatcatattcaaacgtgccaggccacactttaaataacagaaatacaccgtgctcagaagagaacgatccgaaaagccaatgaaccatacataacatggacaacagaaatccgcagaacacagaacgctaagagcaaagagaccatcaacgatccaaaagccaattaactacataacgggggacggggtaaacataaagtattaattaaacatccatattacgacaatcataatggtttgcatattgtcaatacataagccaaattgcttaaagatggcaatcatgcaggttgcaatacacacaggtaataacataaccaaagatttacacgccaagtcttattgatactcagcagagcgccgagattgacggtcagctcaaccggttgggagcttgcagtagtcgatgcagattgatccaagcaccgtgcttccaagaaataccagtcattgtttgcttggttcagaagagcagcagacaatttcatgaggcctggtcagcttggttcagaagagcagcagacgatttcatgcacccaagtatgacatcgatgacgtccccaacatccaaggttcgtaaagagttgtagtagcaacagagaactgcaaattgcaacaccgaagcagtccagacatgttcaaggacacacaaaaaaaaagagcaggcataactatccgtacctccatgacaattggaaaccaatcatgagaaagggaactgcatggttgggtccatgtagttggctaccacatctgtggcgaggactccattattggaaggaggaaaagcatcgaaaatgctaggcattgttggttccaaaggacctgacattgtagggacatcat

SEQ ID NO: 4946 - DNA, 4516 bp, Sorghum bicolor
acccacgaggcagctttgctacgctttagcattgatcgcatatgatgatggtctatgccgcactgttgcgtaccaatcatctacccaatctagaccggcttagtttttgggcccaacagaaagaccgccgggaatgtttggttgctagccatagtctaccacaactaaatttaggtaagtgtggcaagccgcaaaaagtgtggttagcaaattggttgccacactttgtcatgcctaaaggaatcttgtcgtactttttaactctatgacatgtggagctcaaaagaatcatgtctaaagttagttgtcaaccaaacacttgccaacttgatcaaacttgcctaagataaagtgtggcgaactgtggctagcaaccaaacaaccctagaaatgagaaactgcggtgaatggaggctagtgctcctatcttaactttaactaagtttatattaattaaaaaactaggttaataaaaaataatatcgatatttataactttaaatatatatactataaaaaataaatttcatgagaatttcattaatatatatttaacatggattcatcttttggaattgagacaatactaatctatcttttctggaggaatgagttatatcaatttaaaccttaattttaattaaaaaacagggttcaaagtcagctcaccgctcaccgccctaccgatgggcacaacacatagacgtcgtctttctcgaactatatgcaatgggcattgcggtttttaagttgttcttcaatggatttggcataacactggatctcgtggtgatggatatccaaatctaaatggacttttttgaagcatctaagggcagcctcaatgcaggcatatggcagtagcagtctcaccaaaaagcaacgcagaggcaacgtctcaaactacttcacacattgctttttcgttcagggcttccccaacgctacacggtggctgttagcctcaacctccacgtatgcaattgatgtccatctcacatctatcagctgcctcgcagtctgtcagaacagcctgcagaagcgccgagtgcttcgtctgacaaaaactggaagcagtcgttctcgcatgcattggagagctagagcagcaccctcaccactctttttcaagggaccacagtacaaaaggacaaaactcttgcagtcgtagacgagctctatgtcagaggagagcattcatttgcgttgggataattgatagctgctctatctaggtggcctattacttttttctaaggctaatgcttatagtagcctgcgttgctgctgccttcagtgtccctaccccccttctctctcgtctctacatgtccgcttttaccttctttgctctgtcacaaaattagtagctccatgctttatattagccaagccataacatcttctgcaaaaagagaatatgatacttctgcaagctactagaggtcaattggctacttttgttaggtgggtaagtttgaggccacaagacacctaggagcgttggggctagcctaaagcaacaaatgtccaattggatctagaattatccaaatccactaccacctactgagtcctaccaaaagagtttcatccctataaagctcactttttctttcttctaaaacattatttccacaacataaaaaatgtttatgtggcagctttatttgaagcttccactaagaccggtgtaaggaggaaaaattagatcacaatgatagtcgactgtcgagagatataaaacggacttttttcttcacagggtgttggactgctttttatttggactgctatgacggcccccgactctgtgactacaactttgtaaggcccacagggctcaatgttgctcctactggttgcagcgcggtccgcaagcggctcggcctactaacttatatccaccgaggcccagacccagaaggccccgactggaaaggaaatatgtctaccaaaagtccaaaatctcccggccgtctgctcctccccacgcggtaaccctagcagctcggcactccctctgctccccgactccctcgaggtggcggcggcgcgctcctctccctcccctttcttcttcctagtctccctcgcaaattgccactgacgttcgttccttttgcttgcttgctttctgcaggtattactctcgctatcggtcgggccctcgagcgcggaagatggcgtaagttctcctcccttccaaatcttgtggtagtctttcttgatgcgacatgtttacgttgagtgttttgccgggtcgccacattgtcaactcgatgccgcatcgtgttgtgtagcggccgtcgtccgctggattctactttatctggatcgattccactccggccaggttttttttttgacggcggcgtagtcgggctcagaggaacagagtaggtagatgggtatggtggccgaagagaggagaggagacgcggtggcagcgccggctgctacgtggagcggttggtgccggaggcttgggcatgggtagtgtgctgttcgggcttcaggtggacagtgagctgatgggctgacagagttgcaagattgcctgatctgagaattgcaatggagcagccatttaccgtttttctgtgtatagagaattatattcatatatagattgggattgctgctacaacaaaggaaggcgatctaacaggatttaccatgattttgatctgtggattgccgctactaacatgaaggcaaatccagatgagtctctataatatatagaccatactcatggtaaattctgatgggtcttaatttggttactgaattagtgatttagtaattgtgactcggattgtttggtgactaccatgatactggaagctcatcaattcaccatgactttgcagggatcaggagaccccagttgcagtcgaggcacctaccccggtccttggggagccgatcgacttgatgactgctctgcagcttgtcatgaagaagtcaggtgctcatgatggccttgttaagggtcttcgcgaggctgccaaagccattgagaagcatgctgctcagctttgtgtgcttgccgaggactgtgaccagcctgattatgtcaagctggtgaaggctctctgctctgagcacaatgttcacctggttacggtgcctagcgccaaaactcttggcgaatgggctggggtgagttaaagaatgcttccttagaaatgtaccttgtttaactttgtgtcagtctctagatggtcccagcaaaattaatatggtttgcattgttctgcctaattgttagagaagagaatatgatatggttttggtgtgttcatatgcgattatattctgttttagttgtgctatgagttaaaattctagtctgagcacgccattctccactttgcgttgtactgctcagtatttgtcatttatttgtatgtaaagtgagtcttaatcttaacaatcttcatctttggtcttgtgtagctttgcaagattgattctgagggcaaggcgaggaaggtcgtaggctgctcctgtgttgtcgtcaaggtaactattggtttcctactgtactactgcaagcaagaagcaactagtactttggactaggcaaaatttgatttttggctgcttcatttggatcatcaggactatggcgaagaatctgagggccttaacatagtgcaggagtacgtcaaatcgcactagatacagtgcatcagtatcgggaacttgtgttctacactacctttaagacctgagtttaattttgtgcttggttcttgggccttgctaggagattagaacaattttcaagtgtgagccaaggagtgatgtgaacgatttggatatctcaattcttgtttgaagtgttgtcatctggtgttaatacaaatctcaagggctcgtattctgctcctgttcttggttatcattccatgtcaactgctgcccagtcgtttgtggtttgcctgtttagggtgtttgtgaattgtgatgtactcagtctgattgaaattaggagtattttgtttcattggaacaagtgatctgcctttatttatttatttaatgcttatttttctaaaatataaaattgatgtcattagatttgtattgaaaaataattatgactgttatatcacatagtgacattaatagactaatcgtctgtaaagtcatgaaatatgcccaagaggcagcagcattgtttgtttagcattttaatgtggtatctctgctacagaaaatctgttggttatatttccgttccaaattttacttttcaacaactttttggtatattcgtttttctatatatctaggcatatataataatatggatgtataaaaaaaaagtcaaaatgactcataatttggaatggagtatcttataagcaacagccagaacgatctgtttgattggagtcaattgacctagttcgtgctactaggtctcacccgtcgatgccaatcagaattgcataactgtttggttcatgttctaatagacaattcctgagccatgcaagca

SEQ ID NO: 4947 - DNA, 3401 bp, Sorghum bicolor
  misc_feature (2495)..(2747): n is a, c, g, or t
aactttatcatcctaacacatacatgttgtcctcttgactcctatatagggtccatctatagcacagtatttcgacacacgcacatactgtacatatatccgtcgtggcgtcgtctatgtccctatatatatagccggcagcacggcacggttagtccgcctcgtgttgagaacatatcaacgtgtgctttgaaaccatatcatctgtccactgtccttccttccctgcttgctgccgatcaatcagtcgatccaccagttgcatctgcattgcatccgcgatccatctccgtcccgtctgctcaacccagtctcagcgcgtcgtcgtcgtcgtgccagctagctccaccagccggcgacgacaagctagctgccaatagccgccatcgtcaaacctgtgtgcgcacgcgagcggcggcggcattgcagttgcagccccggccggggcagccgtgacgacgacgaccgtacgtggtgggtgggagatggcggacggacggcgatggcaagcagcagcagccggctggccggcggcggagccggaggagcacgacgacgacggcgcgacggcggctggtgtcttgtccggcgagtaccaggctctcgagacgtccacgctggtgtcggcgctgacccacgtcgtcgccggcggcgacgggtacccgccgtgggccgccggcgctgcccgggagaataatcgtgcggcaatggctgaccccggccaggcctacagctacggctacggctacgccgccgcaccgacaccggctcatttcttcgaagcagcagcaggttagcaggcaccggccatgcaatattattctagtatttatttatttttttgggggctgagagagatcgcttgcagctgggaacaaaacagcaaggaataatcctatatatatatatatatatatatatatatatatatatatatatatatatatatatatataacacaagttcgttaaaacaaagaacacctccgcgtgacgtttgtgcgcctttttttttaatttagttgagggttcttttcataacggttccagttcctgttcaattagcatgtgttagtcatgcggccgggcactggcagaatcaaaagttggtgttagtacatatattgtttcgatgaatatgctttgcttgcgccaagacgaatgctgcgtcagagcgaactaaatctgagcatgaatgacatacaagttggctttctcatcagattttgaaaagtactatttcttttttgacgattttcaaaaacatttttcactcttggatattattcttccagcagtagtcgaggcaggttggatggattaaattaaagctaagcgctagaccgctagtactttccacgtcagtattgttaattacagtagcaggactagtatgtagaccggttcgggttcggagcatccagctgcgaacattttcttcagattttggaaactccatttgacctgaggattctcatgcggttgctttgctttaatttcccatcaaaattcaatagtacacaacgcccgaaaaatgtcgatttgaccgagaagaagcgatttgcaagcgtgcaaaacatgatgcatgcaaatggtcgagcctctggccgcctgcatgtggatcttacttgtcaccgatcaagattattagccaagccgctccaactcccaccaaaaacaaatccgctagatatatcacgtacaggaatactgtactcgtgcaatatatattgctacactgctagcagctggttggatcgatcacacgtattactcgtgtcacatctctggcagtctagctacgagatatcgctacaagagaagcgagggcgacgccattgacatgcatgcacggaaaagccagaggaagaagctacgtacacgtacgtgtgtatacgtagagtgtacgtgccagctgcaactgccccctgcccgcatcgatacggatagattcgtatttaataccaccagcaacaaaactacgacccgtatgcaatgcatatgcatggcgtgcgcggaagccaacgcaagggtcaacagcgcgacgccgacgacgcggcggacgcgctatatatcccgtcgcatggctcaccctacggtacgtctcgtgtgcgcaacttgaactagtgctgtgtgctcatctctatcttctatatatcgtgtccacgcacgcaggaggaggagagcaggggggcgcggcggccatggaggacggccaccactactcgcccacggccgccgccgccggcggcgtcggtggtggcgagcggcggttcctcggcgtgctgcagcggccgtgggggaagtgggcggcggagatccgggacccgcacatggcggcgcgcgtgtggctcggcacgtttgatacagcccaggccgcggcgcgcgcctactacgaggccgggctccgcttccgcggtatccgcgccaagctcaacttcctggaggacgtgcgcctgaccactacctccaccacctggtgctgtgcgggagccnnnnnnnnnnnnnnnnnnnnnnnnnnnnnnnnnnnnnnnnnnnnnnnnnnnnnnnnnnnnnnnnnnnnnnnnnnnnnnnnnnnnnnnnnnnnnnnnnnnnnnnnnnnnnnnnnnnnnnnnnnnnnnnnnnnnnnnnnnnnnnnnnnnnnnnnnnnnnnnnnnnnnnnnnnnnnnnnnnnnnnnnnnnnnnnnnnnnnnnnnnnnnnnnnnnnnnnnnnnnnnnnnnnnnnnnnnnnnnnnnnnnnnnnnnnnngccgtcctctgcctcctctgctccgagttacggcgaggcggcggggcagtggacagcctggccgccggagagtgcgtggagctatccggcgaccacgggttcttcttggtctggttcaagccagtatccaccgtcaactcgtcctcctcaatagtccatgctccatgtttctttttttttaaaaaaaaaaaagttccatgtttcatttcataagacgtacacggccttccttttttttctctccacaaagaagaaagcttgtgtgggttgagacgacatagataatagatggttttattcaagaagatgcatgcatccgtgcaaagaaggttgcaatattgcgtttgttcttcacttggtggtgttgaatcctgtaccaatcatgtgttaataatggttttggttgcaacgataatagaaaacgcaagcgataaataatagtatttatttcattataaaacactttatttcttgatgaaagcatgcatgtgcagctaaggtccacaacatctccaagacaatctccatgtcctccccgaatgctacgattataataaaaaattttataaaaaattatcctccaacagcttattctaaatagtaatctaaatatagtcattttgttttccaaatttttcgctggccaaacataga

SEQ ID NO: 4948 - DNA, 12679 bp, Sorghum bicolor
gtccttctatgtgagacatgaccaccaaacaagtccttttgtgtccttagaggttggctgggacgtcttggtctaactcattttcacaaactaaacatatctaggcaaataaagaggccctagacttctatttagatggcttttagaggattttggtgaggggctaagttgtttcgctatgtccctcaaatattggtagttatctacttcacctccttatctatagaatcaggtatctaccctcaaattattgaaaaccatctaaataacccctaaggtagtattgaaggtggttttgttgacgtagcatatttaaaagtctatataaccccaaaacatatcaagggttgacttcatgaccctcttaactacagaatatgatattgtagcccttaaatcatcaaatgatgttcaaattatggtggagatcacttgacgaggtaggatgggtcacgataggcggaacagggaagtaagggtggggttaggttttggggctccttcatatacgctgacagatatcagattaggattatatatccaccatgtcacaatatacattgcttgtattggtgtactgatagtggcattctataaatccatcgtagattacaaggtttgttgtgtgcgtgtttaggcgggatacagtgtccaaagcaccctaaagaccatctgatgaatcatttggatattatttgatgctttacgggctataatatcatgttttatagttaaggggtcatgcaatcaacctttgtatcatgtcaaccaaaaccacctttaaaaccacctaaaggagttatttagacggttttcaataatttgaggggtagaataactaattttataggtgagtgaaataataataactaatagtttagagggttaagtagacttatcattctgatgagataaacaagaaaagcacatccaaaatattaagggtctatttggcacagcccacaaccgtttgtcaacgtcttcttttctaaaatagcttcgtggataaagttatttttcttcttctcttaaagatatgagttagattaatgctgaaaaaagtagtttatcctaactctcttctatttttttattcttgtatgaagctgttgatgagattattttgctaaatatttttttcaaaataactcaactttataaaaaaaattacttatgaagttttttaaaataactttaataataaaactgagctatgctaaataaaactgaaacgtaaagatgattcaacagcctcgcctcagtcgtcggatggttcacaaactgtctgatccctaccgttagcgctcggactatgtctgagcgctaaaagcatcttttaaaaacatatacgccgtctgcttccgtctgttcttcccctccaacacccacggcggttcttcctctccgactccgagtcaccgctcgccggacctcttccgagtttcggaaactcgggcgctattgaccatgaagcctgtatagttttaagcatggagattgcctttagcctgcctattatacgtgctagctcgtactcttgcacacagcttgcttgcagccacagttggcgtttctattagccttgctctcctcgcagcgccgacgctccgtcttctgctccttcccccactcgcgctcagcggcgctcagtctcgagccctcagcgacggaggggcggtcccaggctcggcggcggcgtcagcggctccccctcccgcttctcgccagtcacctcgcgccctcgcctccgtcctccgcgcaccggccggcgaccctgcgtacgcacctccctctcccctcccgcctctgctgtaccgtggaagcccggccagcttcccagggtggccggactttggctccgccggtatccatattctgaccttcaaaaaaattatcattttctgatgctgttgtttgtgcaggctttggaagaagcaaggattcaccctcaggcgcaaactgaactcaactcctgaagacgcggtaaatttgacgcggccatgtctgcggggagaggcgatccaaacacccctggcaacaggcctatgttcctgagtgctggggtgcccaacttaggctgtcacaatcttgcggctccagctgcagcatgcaacaccggctcgatcgcctctcaagtcttgttctccccatgctccacgtctgtcctgaataccattcaagaggtttctgctccacaatctgatcagttgagtctgataagccgtgcaactgaacaagacgacgtccgctgcatccagccatcctggaatatgcctgggggttgcacgcaggtgcctattaatatcgtagtgttccataggcagctcactggaaggggttcgagggcgcagttgccaccgtcggccaccactgccttgcctgatgtttcagagggtaagcatgtccttatcttattattctttctaggtgtcatgttagttcagttttctgtggctgtattatgaatgcactgaaccctctctttttgctgttgcgctatatattccgaaggagcttccattcggcttgctgggagtaatttcttgtcacttggaagaacatcaaatgtcgttgcaggtgatatgacaacgaattcttcacagctagccactccagataaatacaattcagagcatcttcggttgaattgtatatatgatgaagcatccaagactgaaaacggaacagaaactagccagcttccacaattagcagcagcaattttccgcaacagctgcaatgatttggaatcggtgattcctgcagctacctgggaaacacgagttcaacattctcaagaatcaaccacccttcttgcagaaagtaccactgatgacaacattcatatgtaccaatctatgcaaaaaaggctcaagacacaaatcaatcaaagtgaacacacaccattgtcaacaccaactgtacccaaggagaaaacactaactcaaattgagatgcagatagcaagtgctgagaaaactgaaatgttcaggaatgaggaaaccccagcactgaaaatgaaggctcggaggaaaaaacatagaccaaaggtaatcagagagaataagctagccaaagttcaaaaacctgattcaacaccggatggaacatctccgaatcaaaaagtcaagagaagttatgtccggaagaaaagaaatcccagctctctggagaagtgctctgatcctgttagtgatcaatcaatctctagagcaacaggagttgcagatagaagccgaacagcatcagttcgacgaagtctgcaatttgaacccaaagaacaaggattgcaaggaggccattcgtcaatgaccaactcacaccatcacaactatgagaaacctgaccatgctcaaagttctttctactcagaatcagaagtgcagactggacatgcgctgcaagtaggtatggagaattcaccaggagaattagctttcgacatgagtctcagactgaacaaatttttagatgagtacatgcatttgccagagatgccaaaacctacacaagaagttccaattgcaacttctgggtcttttggtactgaactagcaagggaagaagataatctgggaagaacttgcctacctgatggcaaaagtaagtgtagtttgtttactgaggaaagggtggtaaaacccataatagaggggaacaaaaaagacctggaattaaactattctgatgcagatggtcttatttcctcagctaagtccttacctgaaatggaacccacaggcagtcagatgggtaaggtgtcggaagtggagaaccccacacaccatagaaacggttccctacctggcacacgggactctgttgtcttgaggactgcagctgagatgctatcagttttccatgctggtgcaataaagaagaagcgatctgcccggctccgcagaaattccttcttttctattatggatcttgagaataatactctacaagcatcaacaagactgccacagccatgcatggatgctctgtataaaagttcttgcattaagtttatgaccaaaaaacgttcagaaaaggcacgaccacactgttccagttccattcaaccaaatgatgagctgaagaacaggctttcagctggaagcattttttatagtgcatctaatgcatccaaaatatcagaagacagttctccaaacttttcacctcagaccctggacaatgaaagaatcaactttgatactcattgtgaaatagcagaagggagatcagcaaatacatcaacaggaccctatatggattaccttcaaggagttgcatcaaagttgaagcatcttgatttgaatactgaacaggtgcacagaaatgagatgcatttctctctgaccgcacctgctgttatttcttttgagggaacaagtggtccttcaaatgctcttgtcccatacggtggtgcagtgatggttccatatgaaaggcccttgcagttagtaaaaaagcagcggcctcgagctaaggttgacttggattttgagacgacaagggtttggaaccttttgatggggaaatcagctgagcctgatgggactgatgttgagaaggagagatggtggcagcaagaaagagaagtatttcaaggccgtgctaattcgttcatagcacgcatgcgactcgttcaaggtacttctgtaaataagtctaatgtctttagtatatgctaaaataagtttccctttctgctattaacacctgtctcggacatgccagctaaagagtatctgtttacatagtccttgaaataggaactgagcctatagagtgggtgtggtttgagtcctctttgatttcaaatttgggtgcctatttattcttaatacaatgctgccttgttcctgctaggctggtccagtttgcatagtctttgaaatgtttcgattgaacaatctaattttaaaaatatcctgcatgtgatttactttcaagtttatctttggcaatatattgccacttgaagtgttagttatgtgaaagtgaaatcatatgattgcaacagtgtagacttggttcttgttcttggtttgaccatatagagttatacaggaaagaagtgcgagaacatgacatctacgagtgacaatttggaatttacttgaatccatggctgaagcttgtggctaatttctcaaccacttgtttaccaggagacaggcgtttttctccttggaaaggatctgtagtcgactctgtagtaggagtgttcctcactcagaatgtagctgatcatctttcaaggtatgacattcacaacaggtgtcttcaaaaatatatcttatgtacgagctctctttatgactactattttgaaaatcacagctctgcctatatggcccttgccgcaagttttccttcacggtcagtcaacaacagttgtaaggatgatgctaccacagaagacaatgaacaaactaccagcacgagtgcactagtaggagagaaaagtgtgtttgaccttttctacaatggtgctagacctgatctagaagtgggctgtgaggaggtatcaatgacctacaagaagacacatatggaaccaaaggacaatactagggatagtgaattggttgaagatgaaacctattcctttgattacaaatcaaaatatggaagcgtttgcaatcaccaagggacaggtatagaacataaagaaaaagaacaacaactaccagatttctcctcagtagaattaactgcgtctacagaactcatgcagcagatacaaatccagaagatctcatcctcccagattttaacttcaacaactattcaatcaaaattatctttgagttctgagatacctagaaattttgtttgtggtggttctgctgcagcttataagcaactgggaagcaatttcgatcagggaaggtcattaacaggaaatgataccacagtcagggaaattgaatgccacagactccaaatggctgcaaggaatgattatggatttggtaaacctgagattccttctagttctgcaatgccatttttcttgactgttgatcctcaacagctgaaattgagaaatgagacaaatgtttcttcaacatcttccaacagcccttcagattctgcatcaccaaacttgaaaaatggcacgagtcctctttttatgccatttaattcctacatggcactcatggcagagtgtagcagcaataagatcgcttacaccactctgaacactccaaaaacaagcacagaacttccaggtcagtatgcatctctttcttccattattacttaaatgaaatttgtctgacagcaaaaacttaaccatgcagtcaagttacgccatgacaaaaggagtagttttgaagcaccagacttaaaggagcatgaatcagtctttccaacacatgaaatagcagtagaagcaacaagaaaagaatatgaatatacatcgaaatctggttttacttcctgcaatggagtaccagatacagctgcacaagcaccaaaggcaaagaaaacaagaaccgcaactaaaaaggatgcagagaattttgactgggataaattacgaaggcaggcttatagtgaagggcagatgaaaacaagaagtgttgaaagaagagactctgtagattgggaagcagtaaggtgtgcagatgcacaaagaatatctcatgccattcgggaaagggggatgaataatattttagcagagcgaatccaggtaatagttcagtagttactaggattaattgtgatttatatgagccacatcgaaagaaaatactctgtaggttttgagcaaatccagaataatattttatctggttgacatttaacctctccctccccctccccctccccctctccctctctcttcatgaggttctatcattagatgactttaccataaggatatcttctacttcagcataataagttttataattttcttaacagtaaatctggtggtgttacagaattttctgccttttctctctctctctctctctctctctctctctcgcttttcataagtttctatcattagatgactttaccataaggatatcttctactgcagcataagaagttttataattttcctaacagtaaatctggtggtgtaacagaattttctgaatcgtttggttagagatcatgggagcattgaccttgagtggctaagatatattcccccagactcagcgaagtaagatcctatgtttgcatcgacttacctctcagtgatgacatttcttgtgctgtatttttttgttcattttatttttagtcacgatgaacattagaccagaatcattaatgtctgtgagcaaattaagtagagcaagaggtgcgacattttgatgtcagcattgaaaatcagcatataaaattcatcaatgtgcattataattgaagttctgtgaaattctaactttataactagtatacaaatggttagaagttttagttgaaactaaaacagcaaaggattctctacgaaactacatgcatttacgagccttatgtacttaccaagtgacaagtgtttttattaaaatatatttggtttgatgtcagggattacctactaagtatacgtggactggggcttaaaagtgttgaatgtgttcgtcttctcacactgcatcatcttgctttccctgtaagtttatttcttttgtcctctgatagatgtgcggaaatcagcaacccacatacttgaagtcttgaaccattaatacctttttagattaatattactattattaattcatttctttagtttatataagttgttttcctttttggtggaggtttcatctctagccttcaccaacttgtttgtggagtatttaatctgtctctagtaaatttaatatttacatagcagtgcttttactgctcaggttgacaccaatgttggtcgtatatgtgtaagactgggatgggtgcccattcaacctcttcctgaatctctacagttacatcttttggagctgtaagtgttcttcactgtccataccgtttaggtcatttatggatttttgccatttcggtttaatctgattctaccactttctttttttgctttctcacagatatcctatcttggaaactatacaaaagtatctttggcctcgcctttgtaaactcgatcaacagacactgtgagttacaaaaaaaaaacatttgcttcaaagtgtgaatagtatttggttttgtgaatcaatgtgaattgcatttaaataagttccacaagtaataattaccaatattattacattttcacaggtatgagctacattatcagatgattacatttggaaaggtacttaatgagcatctgttttttgaaactagctgaataggttgtgcatttgtacaaccaaatatgattttacagttgtattcattatataactataatgcctctaatttaaaataaaattgtgcttactataagactataattcctacgattaatatatacttatatttgttatagaactttaaggtcttaatctacaagagttgtagattatttctattttgttctttttgtcccagctcagacttgaatgttgaatcccaaaataagaggtgccttgagtcccacttgttgcttttatatgttttccaatcaaccgtgcaggtcttttgtaccaaaagcaagccaaattgcaatgcatgcccaatgaggagtgagtgcaagcattttgcaagtgcttttgcaaggtactgttacactttctgtacaccttcaaccatactgccacagtagcttatactcatagaaaggagctttgtgggggtcaattgctgaacttaaagacccaccaactggcctgcatagttaactttcacattgtgcacacaaaaaccttgtgatgggtgccccacttccattggctgagagatactgcaattacctccactaaagcaatatgacaatatatcctactggctcagggtgaaaagagcactgtgccctcacccctcagggtcaatttgatttcatgtgacagttgtgaatctatatgtccttatgcacagactacacaattgtatcaattttgtatgcatctcacgcatattagctacttcagttgatcttgctcaggagttttacttctgtttacctgaatattgactatttattgttttcttttattgcatttggaatgaagtgcaaggcttgcacttcctgctcctcaggagaaaagcttagtgaagttgagcaatcaatttgctttccagaatagcagcatgcacactatgaattcgactcacctgcctcgccttgaggggagtctccattcaagggagtttcttcctaagaactcagagccaataatcgaggagcctgcaagtccaagggaggaaggacctccagaaaccatcgaaaatgatattgaagatttttatgaagatggtgaaatcccaacaataaagcttaacatggaagtgtttgcacagaacttggagaattgcattaaagaaagcaataatgaactccagtctgatgatattgcaaaagcattggttgctattagcactgaagcagcttcgattcctgtaccgaaactaaagaatgtgcataggcttcgaacagaacactatgtgtaagtggtgaattagttctgtttgggcaaatatcaggtgaaaacgcatgaaaaatcagagttaaagtattccaggacaatctctaaaatatagcaccttttttacgaagaactgtgggggagactatcacatttgtgatagaagttcaattttgaaactcttagacattgtttacacatgatttatcatatgtagtgaaaaggcaagactaaatatttgtgtcttctgcacctctcaaatgcgatcaaataaagttgacattttctaaaggatatagagcattcctttcactgcatctgataattttttaagctttcacctttagtttttacccatatggccttttcactagttacagtgctcttttgctcagctttaacatgcaccgctttagacttaataatgttattgtccatggtaactaatgccatgcatctagaagatttattctttacctgcaatttatgtgctttcaggtatgagcttccagatgcacatccacttttacaacaggtgagatgctgcggtttcttttttaagcatttcaaactatagttcctgatccagcaattgattaacagctaggacttgaccaacgggaacctgatgatcctaccccgtacttattggccatatggacaccaggcaagcttatttctctttgagtgcatggggtacacactcaagttcattttcactaatatatgactactttgcagatggaataaaggaaataaccaagacaccaaaaccatgctgtgaccctcaaatggaaggcgatttatgcaataatgaaatgtgcaacaattgtactgtagagaaagaaaaccaatctagatatgttagaggcacaattctggtaatggaatcctataacctagcaataactgatctgaatatggtttagctgaagtaactgtttatttattttttcctagttgctctgtagcacaacaaagatcatgggagtcgtcaaataaaactgatattatgcatatgtggccccaagctcatcctttaattgtacctagcaaattgtccctttttgttgtatatatatacctacaggttggtttagacctcagagtatgatctataaattcataatattcatttccaagaagaagagcagcatatattttgatctgttgagctaaacatgcattttttttggctagacaatatggacagatcatagtatagataatgcctattggttacagaaattccatgcatgttttagctaatgataaattactggaacatgaataggttccttgtcgaacagctatgaggggtagtttcccacttaatggcacttactttcaagtcaatgaggtaaacagagtgacatctaatatcttactcctagtactgctcctaagcttcctgtctcaatggacacactttttgtgactctgtatctgtccatacaggtatttgctgaccacagatctagccacaacccaatccatgtgcaaagggagcagctatggaacttgcaaaggcgcatggtcttcttcgggacttcagtacccaccatattcaaaggttgtctcccttgcataaacaactcattgaaattatatttgtattggtaccaactacagttgttttggttatgtaggtctaacaacagaagaaatacaacaatgcttctggaggggtatgaaaaaataatttccttcgtcctgtcatgacattatattcctaggaaacatcttgccagttgtcatgagacagttctgcagaatgcagatcctgtgatagaccagtattctggaccatagtatattcaatctcagtttacagtgtttcgctagttatacaagattctcatgattgtcacatgtgactattcagtgatgaagaaaatcgttaatagtcgctacatgattgatctgtagtcatctaagtttttaagataacctgagaatagtagaggcatcttgtaatagtggaatgataatgctagagaacaaaaactgccaatatgaatgcagagacaaaggaattgatgtgcatgcttattcataaacttacatttcatacacacaaaggtcatgaacggaaacagtttctaggcttcaactccgcaatgaatttctgactgaaacaagtaaactgtggctgtcttacgcaggatttgtctgtgtgcgaggattcgacatggagactagggcaccaaggcctctctgccctcatttgcatgttgtagcaagaccgaaagcccgcaagacagcagcaactgagcaagtactctaatcaacaaagatatcagttttatgaacatcgtgtttattgtgatatgatatcaatagctctcgacctgtgcatggaatcatattagttcctgccggacgatagccattctttaggaaacataaaccatggatggagtccgagactgttaattctgagacgtgaggactactgaagcataaggaagaaccaatagttttcacttttctgtttcagagttactatatgtaaattatcatctagctattaatccgtgtaatgtgtcattgcaatcctttctgagacaaactaccttatcaacatttcatttggttaacatttgttctgagtactggacagcctgccaaaactttgtttacgtacctgtatattcctgttatctgtacaatggtttagtgacttttggtgcaatcattttgaagatcacccagagtgttgggagggttatgatggtaatgatgaataagcagtgttataatgagcaggaaaacaaagatagcttatgaagcaagagagcctttgccatcacggaaaactcacgattgccacctaaaatatagggatatatgacataaagagaaaaaaaaaacagatcagaacccttaaataccatgaaaagagcaatacctgacatgatgggtgcgtacaaccaaagaaaaaaggattcaggagattgcagacttccagagcagtgtctttgcctgtttcttgcatatttctctctgcaaatgcttgttcataggatgtttccgttaaaaaaaatagctttattgccatcctagtaccttatcataacttacatcggacagacgga

SEQ ID NO: 4949 - DNA, 9415 bp, Sorghum bicolor
aatacatatatttgcacatacaagacaagtgtacttgtttctaatttgttcttcatagatagatagatggactgaattcataattatatatgatattattttttcatacgtctaagaatgagattttgtttacgatatctaataagtgcaaaacatttctctttgtgctaaaccatattacattgtaaagaaaataaaaccacattgaatggcaaggtagtaacatgtttctatgtgtgtttttcgtatacttataggtatacacattatgattgtttcctatgttttttgtgtctcaaaaaatgagatctaatagctcatacaatatctttgttaaaacatgcaatatgaaaacctctaacctagtgttctccttaagttttgtcatagtgttggtacctcatcggcgatacgcttacgtaatagatatatagacatatagatagataaatcgaggactgtatacgtcattgcggatgttaattatcttttcgcattacttatatgtgtgagagatgtttatcatgatatctaagaaataaaaaacatttctttcttgctaaaccatgttaggcataaagaaataaaccatatttacaagcaaatgacattggtactgtgacatatgtttttatgcgcgcttgtcataaatgatatgaaagacggagaaatcttctatacatgtcaagcgtaaagaaataaaacatatctacaagcaacgaacattgctaccgcaatgtgttctatgtgtggttgtcataaataaatgatgagaaagataaacaattctatacgtctcataaggatgccaatgggtgtctatgatgttctttttggggtcagctaattaattagagataaatattgttctagcttatttttctctcactcaacttacaacttaagtaatatcattctagttcatttaagtaagctcagccccaataactcaaagtaattagaacttgcatcccttatctcccgaactaagttatgcgcaatataaggccctatttggttccctttgctaaattttaggtagctaaactttagtcactttagtagctaaagtaccaaacacattgactaaaaagagctaaaatagtttagtcccattagtcacccaagagtaactaaaataattttagctagctaaagtttagcaaagggaaccaaacaggccctaagtatagtttctctatctaaccaaaggtgttttttcctaccatatatgcgtaaacacaggacattcctctttcaatgtggaattggcattttctattttgtaccttttacatgaaaaatggtatatgtataatatgatgttttattgaaagaaataagtggcaaaaaccaatgaaaagaaaccgccgctgcattgccaactccactgtatccggctatccgcccattattattattatccacagatgacagatcacaggaagcagtcttgagctacactctttgtccatccttcttgacccatgggtgggccgtggtcatggccataagatgttgagacctcagagctcaacctcctgctctcaccctctcccccggcaagcacaggcttttctttccctttctcgctcttcttttcccctcgctgtgtgtgtgcagcacataataatccgttctctctcccccggtttctccttgtcttcttgcggcaatggaccaagaaacctcacgggaaccccacccctcgaggacccgtccactaccgcattagtagtgggttccattccattcgcgatcgcattgcccgcctttcttttggccctcttggttcgctcttgattcttggacgaggcgggatttggagagccgagagcgctgcggcggcggcggcggcggctgatgttttcttggtataaatctgtgttcttgatgagttgggttttgatcttggcaagcgctagctagattaattggttctggttttcgtgattaattcctttcgtctgagtagattgtttccatccctggaggagaggatggtgggcggtggagagcattcgtccatggaccaccaccctgacgccgaagacctcgagcgcggcgagctgcgccgtgacgtgcctgagtttgcggacggcgacgacggggacgaggtagaaacccagtacttctcggacgcggaggaccggtcgtgggcgtcgcactcgcgccaggactccaccgcctaccaggactgcatctcgccgtgcgcctccgcccgcgcgagctccgtcgacgccgacgccgatggcgacgccgctggagaacactgcaggaagtcgtcatgcgtgtcagagggctcgctggaggacgttgacctggaggccggactgagcgagatcatcaaggccagtcctgagaaggccgaacagaactgccgcatttgccaccttggcctggagagcacggcggctgagtccggcgccggcatcacgctcggctgctcctgcaagggggacttatcctacgcccacaagcagtgcgccgacacctggttcaagatcagaggcaacaagtaagtcccactccatgaactctcggtgattcagtccgattcaatttagttcattaggatttaggagcaatgtgcaaactcgtcattttcttttccttctgaaattgtcctcctaatttttaagtaggagatacacaatgcagatgtaataaggccttgtttagttccaaaaaattttcaagattctccatcacattgaatcttgcggcacatgcatggagcattaaatatacatgaaaacaaaaactatttgcacagttcatctgtaaaccacgagatgcatcttttgagcctagttactctataattggacaatatttgtcaaataaaaacgaaagtgctacagtgccatttttcacaagtttttgcgaactgaacaaggcctaagacattaaacgcacgctaaccaacgccggcctgccctttaggcctacaccctacgaacgcaacacagattttcagggtttactgactgcagatataggttttatctgaaaggtaatgcatttggtggtgcacgaacacatggttagggaatcttagcaggtggcggttgttttcgttcgctttaggtggccaaaggtaaaagcagcaaatggggaggaaaagcaaagcaaatgattaattagtaggcttgtaggattcccgaatgttgagattgttgaagaggataaagttcgcatgtgttctttcagtctgctttctcacagattctgtgcattatctgtttgctcttggagtgttctttttttttctttaagaatttgtagagcttatggagtgttgtgttgaccaagtgtgttcttgatagattgacgtggtctggcttgagtacttgtgacatgggtttttgttttttgttttgtggcatagggggtagtgtagttgtgtcactttccactacacaaggtatatgctttcataaaaattgatgtgggcagcagtcagcaatcataaagtgttgcacttgaatctcattgataagtgtttcccttacaggaagtaggtgcagatatttctagagaagagcggctttcaattatgtatttagcacacattggaattctgtagttcagtagattgatggtgctttatagaactttgtactgcagaagaataggagtactttgctatctctagttattggaaacaagaactgccaccttaatcaatattggggcttaggagtcacaaattgagcacaagggttttccctacaaattcattttgtctgctaaatttctctacagtataaatcttaaaacaggtaggatgtttttttttggtaattagttcaaacttgtaacacatactggtgattttagtttgaattagcaatcgcaattaaggacagaaacattgttaacaaaagaagtaaatgaaccttagaagtaaatgaacctgtgtttattcttcatgttttatgccactttgtcaaaaaaaaatgtgctctgacttgaccacatgcaaattaggcaaacatccaaataatacacgcagagatggctacgcctgttgtgtagaacataaaacactttcgtcggtgcatccatttggaacatagatctgtttcaagccatgtggcttaagcctttctttcagaggagtatcagctcttatacttgttaggacagctgattgtctttgctttttaatcccttgcatgatatgaagccaagtttgctaccttgttctcttttacatgcttagagacatcgaattattacccttctgctgtgaaaaagaaaataaaaataaagtaccgtatagttcttatgatttgtatgcaatttgatagcgtatatgaactaaatgtctctcgtgttctttgctataggatctgtgagatatgtagctcaactgcatccaacgtagtagttttgggggatccagagttcagtgaccagtggagtgaaacaggcaacgtagctgcagtgcaagcgccaccggctgaaactcggaggttctggcaagggcatcggtttctcaacttcctccttgcttgcatggtgttcgccttcgtcatctcttggctctttcacttcaatgtccctggctaattaagttgttggcgcacatgggccctgaataaaaagctccaaagccattactccaaacatgtcggtaagatctagcaaaatctgaaagaacaggctgggttgaagcaaaagtttgaagatggtagtacaagaaagagtacatggtggggatgatgatgatagtgcatttatgtatgatgatgatgcactctttgtgttggtaaaaagagagaaagatcagagatggtgacgatcccgcaagaaagggaacatgattgagcgtttctttctctgcccaatctagatgtagttagttgaaagcaaggaatagaagatctgttgcttcgtggttggtgttatcatcgtgtggagtggaggtgagagggttgttagtctactagtcattttctagcttccaaacggttttgttgttctggcgtgttgatttggggtcatcatgtgaggattcctctcagatcgcgctttgttccgatgcttctaatccttgtgaaatggtgagctggttactctcgttgaggcatgtctctggaagtaattaataaagaaaaggttgttaaatgctctcgcttctgtgtgcgatattgcgtttttcgttgatctttgcgcatgttgtctttggtttgtttcatggtggggagtgcagacagagggtgggcagtgacatgatccttccttttccttgggtgagctcgatctgcctgcctcagaattctgggagcctgcagttatcagcgttgcagagaggcagaggaacacaataaaagacctgatctatctgattcacgggatacgttcctgcttgcgggcccgattataaatgcacgatcgaggcgttgcgagtaaacgcggcttgcaagtgcaattaacgtgcatggacgtgtttgaatttcgaagtgtactatagcgcaatgagtttttcttcagagctgcagggattcggatcctatctatacgtacaacggtacgtgcgtacagcaagcgaggatcatgccttcctgtggttacaggaaaagttcacaaataacgccttgtttacttccacctaaaaacccaaaattttttcaagatttcccgtcacatcgaatctttagacgctgaagtattaaatatagacgaaaataaaaactaattacacagtttgaccggaattgacgagacgaatcttttgagcctagttaatttatagttggacaataattaacacaaacaaacgaaagtgctacagtgtcgcgaaattttttttcttaaggaactaaacaaggcggagaagttcacaaatcacaacaacaccgtaacacttgcggatgcgcttgtaaactctactcttcctttacttaaactgcggttcatcagaggattagctttctatagtttctgtgattgtctgattggttttcccaaccaaaaaggtggtcctgtctagcctcttgcttttggaaggatgatgaagacatccacatgaccgcacccatatggccatatatcaagtttgagggtgctactatctgtctgtcttggcacagagaacatatcctgagccacttttttggttccatttcaaaaaaaaaaaacacacacacacacacacaaaagtgcttgaaaaacacaactaaaatatgaatggaatagattaatagatgatgcaagttgttcatgtaaaaatttagaataaaataaattcgtcgaggagaaatagaaaagagaaatcatgatatgatttttctttgaattatagtcataatataattgggtcagttgcacctcgatccataacccgcttacccgcacattttttttgttccttctcttttgtatattttcttcatcctcaaattttgcacgatgaaactttgcatcgtttatctgtactctttagtagagcctggtggaacatctggtggcgctttctttagtagtcttttttctaatagttggatgctcacacataaccctatttaatttgtgttccgctgcttattttgagctctctccgacccgaaataggtacacacataatggaaggcattgtgaagggtttgaggacaattcaagtcaatgagttcatgtttgcgctcttggtttagagtttgatcaagtgaagattggagacttggtactcttcgagttcgttacctcctaaatgtctcggtagaggactatgtgactttggtggagttgttgttgggaggctcctaattgtgtgcttggtttgagactgccaattcagagtgaagaattggtcttaatagatcttgagccttggtgagaaagctagcgcttcaggttaaagttagactcatttggcacagctcagcttcactagtgagcttcattagcaactttctagacgcagttgagctattttgaaaaaaaaaatgtttggcaaaacagcttcatcaacaccttcatgcatggatgaaagagagaaatgagggagaggactaggataagctattttttgcagtttcatctcaactcatatctttgtaagtgaagaaaaacaccttcacccatgaagctattttgaaaatgagcgtttgccaaaaaaaactcataatagctcataaaaactgttgtgagctatgccaaacaaacccttaaacttggggtcagaccgagaaaaagactaggcatgaggagttaagcggcaacgacgtgtggccatagggataaaggagaaaaatgttatataggctaacgtttggggagcaccatgtcaccatctcatctctagttttgtgtccaaagtccaaaccaaacataaaaacagaaacagtcttatctctttttaactaaaaaagaaataaaaataacgccatcaccaaatttaggataggagcattcaatctcctttatccaaaaactaaaccaaaaactacctaagagtaactcaaatctaagtctcgaacctaagagcatctccaaaagtatttcaaaaattcactttctaaattgaagagttattgtggactgctctgaccttattgtggactgcaaaacagcttcatcaacacctcaactgaagagttatctacataaaaaatcattttctatatgctttcatactccaacagcttttctatatcttgtatatactctagagaactattttcgctatctatcttcggctagcgagaaatccagaatagatgatagctatatttagataaccacttaaacaagttgtttgagggtattttttttcgatatctctattcctatcgattagaaataatataaagaatctcttcgagttgctcttaagcccaatccagaggctggagaaggtcatggagcccttgcgttgtgattcaaatgaaatgatcaacagttaaaaaaaagaaattttctcaaaaaaaaaagttaaaaaaatgaaatgctcaaccgagagtctagctttctttttttgtgtgttagtgtggactcatggtgctatgctggtcccatgcaacgacttgaatgcagcacagcatcactcacggtaaatctgcggttcgtgaaggatagatcagctaaccaggttaatcgtcgtctgaacagttgggctgcagcaccgccgtaccggacacagattcgatgaatgctgcccaggcgcgtcacagccaaaatcatctgaatctagttcattcgagaaaacaggttgtcccgctgcctcactcgatggcgctcgaggcacgcttcgcacgtctttcgcagctcccacagacaacccacaaagcgactccacaactcaccacatgcgccgctcgacgcctgcccgcagtcccagctccgccgtatacgcgacgcaacagaacgcacgtgcagggcttcccgcgctgtcgcttggccttaacgtgccgtcttgtggactgctctgaccttatccagcgcagcacgaaacgaatatgagtgcgttggcacgaaggaacaccaacctgcacacttcaggcaccagccatcgaagcatcattgctcatcgaggtggaaggccgcggcgaatgcacgcatgttttagcggatcaatatgtacaacaagatcatttttccccctgtgccatcctgagaaatgtcattgcaatgaggtatgatgcaaaactgtaccgaggaacgccacgagattctgattcttgcgcagcgcaacgcaacggcggttcaggaagatgcatgtgaatgctgcggctggattgctggaatctcggacggcttcaggacaacaggcggccggccgaaaccgggcagtttttctcggcacccgcgaggattctcctccgagcgccaaggacaaagctcccggcgaaaagcagatgccgccagccccctacgtgccgttggcagtggcctcggagagcgcgtgattgatgtcttcgtcgtgcctcccgttcatctgtgcccgctgtcgctgaaagccaggaacaggcacggttaagtacagcattgtgggccgcgataggacatagcacaagcacaacacatacaggcagcaatgcctagacaaaagggattcaggagaggtttggaagtaattaaactaatagatccttgaaaagggttattagtgataaaacaaagatcaacaattagcagtctaatgcagttgtgacagagatggctacgcagatccaaataggatgagtagggttgcctggtaaagagttgttttagtataaaatctacattacccgatcagtagcatccacatggttcccattcagtaacttgtggaactcatccttcagtttactgtctttctcctccttctgcctggcctctttatctttggagcttaatggaagcaaaggtagcccgctcgtccgatccggcatttctacagaaatgtcagcaagccctgttaaaa

SEQ ID NO: 4950 - DNA, 5877 bp, Sorghum bicolor
gtgctcaagcatacaacaacgagaaagaggtgaatgatgtgctgaatgtcctcctcacatcagtaactcatcactcatcagcaagcaaatgatatcccaattttgaaaccaaagtaaccggtacccgctgctgctctgcgctgcaggtcgggtttggtctcaagaaagtgctggacgagggcatagtcaagcgtgaagatctcttcatcacctccaaactctggtcagttagtcagaaattcaggacttgccgacttggcacatctgactgaacatttcatttgtgtgtgcaggaacaccaaccatgcgccggaggacgtcccggttgcgctggacggcacactcaagaacctgcaaactgactacgtggatctttacctcgtaagtctgcaggaactccaaacatacgtgcattgtttttgtcacaattcacaaaaactcaaatgtaaaacttaccatcggaagatgccggtgcgtgcgccgttcgtcagatacattggccggtgagaatgaagaaagacgccgggttcggcccgcagagcgtggtcccgtcagatatccccgcgacgtgggcggcgatggagaagctgtacgacgccggcaaggcgcgcgccatcggcgtcagcaacttctcgagcaagaagctagcggacctgctcgccgtggcgcgcgtgcccccggccgtcgaccaggtggagtgccaccccgtgtggcagcagggcaagctccgcgccttctgcgtggccaacgggatccactctccgtacgtgcacgcagttctgcagagagttctttctaaaagttttatggtaggtagtgtgatcagtcaaaggttcttgatcggcttgctgtcgtgtcgttgcgtaggcctactcgccgttggggtcgccgggaacgatgatggtgaaggcgggcgcggtgctggagcacccggtcgtcgtgtcggcggcggagaagctcgggaagacgccggcgcaggtggcgctgcgctggggcatccagatggggcacagcgtgctcccgaagagcaccgacgaggagaggatcagggcgaacttcgacgtctacgactggtccatcccggacgaattgttcgccaagttctcggagattgagcaggcaagtgtaatggcatcagaaactcggaagctgaaacgctgcagctgctgcctgctgcacggcgaatgtcttaccatttttttttcgtctacgtgggctgtgatttgcaggagaagctgattcgcgcgggcttttttgttgatcccgaaggcgtgttcaaatccatcgaagagttttgggatggcgagatctgaatgggaggagctggagtgaggaacttggccagacgtacggggaagaataaatttatgcgtatgaaactgtcaaagacagcgtagttttcgggtacttggtatttggtactacttggtacttggcatactttgtactccaataattttcggtcgtctttaaataatactaatactaatattcaatttgacatcattggcaatttggcattcgttttttacgaacttaaaatctggaattgtcttgccattgcgactaatgcccgcaacttggacacgactagctagcgtcgaatctgattcagcttcagaaaaatcgagttgggaagacaaattgttgagcactcgttccctggtgagctgacagagaattgccctgttgttctggagtcggctatcaaaggagcagtgcctgctcatgacgtcgccttttgttgcgacaatggacagccgctcttccttctccttccattgccgatttcacgcttccgctacacgaggaaccacctgcgccgtcgatggtttgcagacaacgtgtacatcacaagctcggttgagatattccagtaactaatatgccagcgacagcgagtgctgcaagtaactatcggtgatgcgagtgccgtgctgctcactgctctagtaggtgtcggagttggagcgcaaccccacacggcttggtcaacacacccaaggcccaattccatccccacactgaacctgcttcttctccgatagcttttctctgctttcctctacaatcttcccaggtttccctgaccaaagatggctgaatcctttgttctcaataccggcgcgaggatcccatcggttgggcttggcgtatggcaaatacaacctgacgctgctgtcaacgccatctacgctgctgtcaaggtctttttcattgccctgttttccctttcagacgaaaattttctttctaagctcgcctgtgtttgtatgtgttaacagtctgaattacctgtatcgtttcatcaggatcggatactaggattaggataggcctgtattctgtagattataataaggcctttttggtcaaccttatgtccaattggaaatctctgttgatgcagttacttcagctaacctagctagtagctattacaaaggaactggtaaagtcgaagcggcttgtccacgaagtgttcatatatatgctccataggatcataatgttaatttaaatatagaagaagaacgcaacatttttttttctgtttttgaccttttctgtttcaaagtgtgttttcaagtcatggatgtgccatcggattgtttgcatctcttctacccgagtctaaaattgccgttggttttctgatacaggctgggtatcggcatatcgattgtgctccagcatacagcaatgagaaggaggtagtaatagcaattacttgcacaccagttttccacaacatgatttgtaactgattacgtagtactgtttaatgctctcaggatatatatgtatttatttatttatttatttatttatttatttatttattgacttagtttacttttacagcatcatcatattaggccttgtttagttcacccccaaaaccaaaaaatttttaagattcctcggcacatcgaatcttgcggcacatgcatgaagtattaaatatagacgaaaacaaaaactaattactaaatcgcgagacgaatcttgtgaccctagttagtctatgattggacaatatttgccacaaacaaacgaaagtactacagtagcgaaatccaaaaaattttcgcatctaaacaaggcccttgtttcagctcacatgaagatgactcaatgctaattatttgggtactaataaataacaagcatggtattttaccttaacttttgatttgactccccccccccattttttatgtttcttggtacaaaattaagttattgccttttgaaaacaatatcaagagaagaatcatactcggatatactgataaaaaacaaaattcaattctcttatggtattcacaatcaagtacaagtgataagatgaaaaaaaggtgtaaatgtagcacaaccattcaacagtaaaaaagagaccattggaggaaaaaccttctacatttttacttttgtttgattcgatttgaaaaaatattacataagtggtaagtaaatttaaatattcatttcataggtgggtttggctttgaagaaattatttgaagatggtgtggttaagcgtgatgatttgtttatcacctctaagctatggttagttttatttctcagcctctgttcaaacaatgtttggataagtaggttacctaacttcgtttcagagtggaaactgtaatgataaatttgctgaaatttacaggtctgctaatcatgcacctgaagatgtgaaagagggatttgataccacacttcaagatttgcagcttgactacttagatttgtacctcgtaatgtgcctatacatgcctatgattaaccaaacaatagaagctaaagttattgtccaattagatatttggattccattcacttcagtaactgtgaatctgtccaaacattgtgataatgaggtgcagtactcattaaatattagttgcttggcaaaaatgtgtcgacactagggatacaaaaaaagattgttatttgtgtagtgtgtttctcatataagacaatcacagcttcctttccagatgagagtcacatcttgaatttacatgcttatgtttccatcttaagaagctctccacaacagaagtctacaactaatattaaagaaaattccatatgcatcactcagttggactatggatcgctaagctcaattaactgcttgatgtgactgccttttgtctcttaccgtttacatgacttggttgcttaaatgaccttgtttcgcagatccatggtccaatccgtatcaaaaaaggaactagcattacgagccctgaaaattttatccctacagatatccctactacatgggcagcaatggagaagttatacgaatctggcaaagctcgtgcaatcggcgtgagtaatttttcttgtaagaagctggatgatttgtttgccgttgctcgagtgcctccagcagtgaaccaggttgagtgccatccggtttggcagcaagacaagctccggaagttatgccaatccaagggtgttcatctttctgtaagcttgtcagaacataaccaataattccttcattttttatttttatttttactaatcaagcttctttctctaaactcatgctgctaacctgctgttatttcaggcattttcgcctttaggctcacctggatctcctggaatcaatgggtcaagtgtcctcgagaactcgattgtggtctctgttgcagagaagttgcagaaaacacctgcccaggtcgctctacgctggggaattcaaatgggccatagtgtactaccaaaaagcgccaatgaatcaaggattaaggagaacattgacatatttgactggtctattccagaagatttgatggcgaagttctctgaaatcaaacaggcatgccctaatgcaacctgctagttgtatttcattgattgtcttcgtctatgattgctacaactgttcatgtaccagagcaatatgcatattttttcaatataatgcaccagtcttttcttgtagaaatttaatgagtgaagtctttgggtacttacactttcattcttccaatatgatattccttctggtttataacatgcaggtcaggctgctgagagctgagtttgcagttcaccctcaaggcggctacaatacattagaggatttttgggatggtgaaatataaaaagcatacaaatttgttcagaatagaagagccaggcgaggaaactattctgacatggcagatgctttgcttggacagctgagatatgattgccttggtttcgagagagagaaactgaggatagttgcccctgttgctgttccaatagaagctttgtgtttcattgtatccaaagatgtctgttccaattccgaccaaataaaatgcagtaatggcattttcatcttatccttatttgttttggagtcttgtgttatcattgatcgccaaaaaaggagattgaatgcatagtcgctaatacggtgaatttggaggtttttgtgctcgaacacaagtattgtgactagtatgtttttttgtagtggtaaatacaatttggttagtcacaataagtgtgttgtgctgctcaagaaagacgatgatagcactcaaagacataaggaattatattggtttaggccagagccctatgtctagtcttagagatggttcgagtttgtgctcctcggctcaaatgctctaaagtcttacaatgggggtgtgtaagctaagggaaagaggtagaagaagtgaggtgaatgaatgcccaaatgaattctttgagagttcgtctccttggaagggaggcctaaccatccctatatagagttcggggggccaggttacatatagagagagaggttttcctgaccaaacggttgtgagcccaagggagagagaaacaagtaaactt

SEQ ID NO: 4951 - DNA, 4482 bp, Sorghum bicolor
caaatagtctgaagctagttctaaattttaatccatttcatattaaagctttagttaaaatgctctaaagtttagagaagagaatccaaacaagtccttacttatgccatatctaaactttaaccactttaacttttgagactccaaagaggagatctaaactgccgtctagtttagccaacctcacaaaatctccaaatcacataagtaagctaaagtgcttcaaaattgtagttcttaattttaaccaacttaacttgttgtagacgaaatggtgtttggttccacagttaaggaaggtgaaattcatgatgcttaagggagagaaggttgccaaatcaattaagcaataagcatgagaggagtaattttaacgggtgcttctaagagtaaataaaagatgtctttatatcctctaatattgatagcaatgcgtgaaaagaaatctctccaacacatttttcatctagatctctaaatatttcgattctctaatattttatcattgctcgctaaagatagagagcggagctagttttcaaaagtataaaacaagatatagagacgttattagagggttgagagatatagatagtgatttttggatggaatggctctctaaatcaacatttagtgagtgggttcatgaaagactgttgaagatgttttaaaagtctatctaaacttcgatctctttatctttatttgaagtgtcaacctatggatattctctttatatatctctcttgtctctaatgtactctctatttttttcttctctatactccaacaatttactatatattcttcttgtgtgaaaagattacgatagaaccgccatatattcaaagagtgatgtagcttcttcattaaaggagagcaagaaggtggttatggagagcagaaaagatgaaaaatggttcagatagtctattggagcctgattttttatttggttttctaaattttgtgaataaaatccatgcaaatagtcttttggagatgctactagatgaactcaaccaccttttaaattcgagttaatcattgcgcactaggcaaaattgtgtcagcatttaaaaaaaacataatgctatcaaaaattacagggctgtttggaacggagaaatgtaaaataaaggaaagaaatgaaacacatgaataggaaatgagtgtaggcaaaaaaacagaggattaaaaaatacaggaattttataggcattgttgtttagaacctaggaatataagaccatgtttattcctccattctattaaacaaggacttggtcatccctccattcacgtgtaggaaatttttacgagagcttgtagcagatgattgaaaacttcattcctatattccaaacactatgtgatgtaagcaaaaacataggaattagattcctttgaaacctctaacaaattcctccaatccaaacaggtcgtgatactttttttgatacattgttaggatcataaacatccattccaaacactataatccctatgaaaattccttcaatccatacaggttctcatactttttttatacattgttagataaatagatagtaaacatgtatccatagggttgtgtgctttatatatgtttgtaaatgtgtgttttttttaaaaacggtagtacaccttcaaaagcagcatatttttatatataaaaaaaacgagtgcaccatgaaatgcacatcgtctattttttttataaaaaataaaataaaataaaataaaagctagacccacatttgggttgggccgtaaacgtgatggactttgaaagatgcttcgtgtggcccacagattcattgagacgacgagcggcacgagcccactcggcttgtttcgtgcaggaacgccgctgtcctgtctttcgcgaaatcgcgattgacattccacccaccggccgagtgccgcccaaaacttcaccgtcgcgtcaggaccaccgcaccgcacttgtcgctgccgcatcggcgccatcaccgacaatggagagctggttgcggggcccggcctataactgctccgggccgtgtccgacgcgactgcattccatctgccactgtcggggtgtcgaggccgcagatatttcggctccaacctttggaggcaggcaaaaccgcacagggcaccagagtgttggtacgcagcgcgcggtacggcgtatggccacccacttcgtcctcaacaccggcgcgaagatcccgtcggtcgggctcggcacctggcagtccgacaatggactcgtcggcgacgccgtctatgccgccgtgaaggtaagtccatcgttgacctttggtcccctggttcatggtttcagctgcagttcttgttgtcacctagacacttaagctcttgtttggatgtagtcagattcacattaatccacatgtatcggggtgggttggagtggaatttgaactaaattccaccccaatctacttcaacacatgtggattgaggtgaatccgacaacatccagacaaggcctaatgtggatgttcatttgtcatttctgtgtccatctaggtccaattccattgcttcagtcaacttaatgcatacttgttctccttttccttgaactgttgcaattcagttcctgattttttccccgccactgaataacgtgcaggcaggttacaggcacatcgactgtgctcaagcatacaacaacgagaaagaggtgaatgatgtgctgaatgtcctcctcacatcagtaactcatcactcatcagcaagcaaatgatatcccaattttgaaaccaaagtaaccggtacccgctgctgctctgcgctgcaggtcgggtttggtctcaagaaagtgctggacgagggcatagtcaagcgtgaagatctcttcatcacctccaaactctggtcagttagtcagaaattcaggacttgccgacttggcacatctgactgaacatttcatttgtgtgtgcaggaacaccaaccatgcgccggaggacgtcccggttgcgctggacggcacactcaagaacctgcaaactgactacgtggatctttacctcgtaagtctgcaggaactccaaacatacgtgcattgtttttgtcacaattcacaaaaactcaaatgtaaaacttaccatcggaagatgccggtgcgtgcgccgttcgtcagatacattggccggtgagaatgaagaaagacgccgggttcggcccgcagagcgtggtcccgtcagatatccccgcgacgtgggcggcgatggagaagctgtacgacgccggcaaggcgcgcgccatcggcgtcagcaacttctcgagcaagaagctagcggacctgctcgccgtggcgcgcgtgcccccggccgtcgaccaggtggagtgccaccccgtgtggcagcagggcaagctccgcgccttctgcgtggccaacgggatccactctccgtacgtgcacgcagttctgcagagagttctttctaaaagttttatggtaggtagtgtgatcagtcaaaggttcttgatcggcttgctgtcgtgtcgttgcgtaggcctactcgccgttggggtcgccgggaacgatgatggtgaaggcgggcgcggtgctggagcacccggtcgtcgtgtcggcggcggagaagctcgggaagacgccggcgcaggtggcgctgcgctggggcatccagatggggcacagcgtgctcccgaagagcaccgacgaggagaggatcagggcgaacttcgacgtctacgactggtccatcccggacgaattgttcgccaagttctcggagattgagcaggcaagtgtaatggcatcagaaactcggaagctgaaacgctgcagctgctgcctgctgcacggcgaatgtcttaccatttttttttcgtctacgtgggctgtgatttgcaggagaagctgattcgcgcgggcttttttgttgatcccgaaggcgtgttcaaatccatcgaagagttttgggatggcgagatctgaatgggaggagctggagtgaggaacttggccagacgtacggggaagaataaatttatgcgtatgaaactgtcaaagacagcgtagttttcgggtacttggtatttggtactacttggtacttggcatactttgtactccaataattttcggtcgtctttaaataatactaatactaatattcaatttgacatcattggcaatttggcattcgttttttacgaacttaaaatctggaattgtcttgccattgcgactaatgcccgcaacttggacacgactagctagcgtcgaatctgattcagcttcagaaaaatcgagttgggaagacaaattgttgagcactcgttccctggtgagctgacagagaattgccctgttgttctggagtcggctatcaaaggagcagtgcctgctcatgacgtcgccttttgttgcgacaatggacagccgctcttccttctccttccattgccgatttcacgcttccgctacacgaggaa

SEQ ID NO: 4952 - DNA, 7201 bp, Sorghum bicolor
gaagaaggtgggaaaggaaaagaagaaaagaaaagacatgttcgaggtgagaaaagtgaaagagaaaaggactaacgtatataacgtatatagaaaataaatttagagtttctgatacaaaccatataaaaatatagaaaactcttagagattactttttttcccttcctatactaatttaagagttgtcaagcaacgtattttgagaaataaaatatagaagatgctctcctacctatgacatgcctggatgggcggaattggagagttctcgtgtcccttggccagtgttcttttttttttttgaataacttcgtccttggtcagctgagttcgtgcaactcacaccaactccttcgagatgcggggatcgtcctcggttcttacaggaatcgagctgcatcacacggctctaggctaaaatgcactcttttatgtgtttgagtaccgggatgttgacacgcaattaacccaagggaaaataattgcacggtagcacacctcagtgtaaaaaagaataccattaagtatatctgtaacaattttttaaaaaaaaactaagtctacagaaaataacatcaatgtttatgtatttttatcgtagatttatttaaatactgatttgattttttaggaagtgaaaaatatattttttgggggtgggggtgggggtgggggtggcacttggaactgcagcagagaactacgaaaggaatgtttaaagctggattcaaacgggacagaaattataagccaggacacggatggaacgtctgatgaaatttgtcccggcagcaaggacgaacacaaccccaacaattttagaaaacaaaaactgggaaatcctgtctgatgaaattccatgcgtctggcagtccaggcatattcacatattcgtacaaacaataatataaacaccactgaccacgcagctggggtagccggccacatgcgccacacgcattattattggagtgcccgccctgctcgcagctgtttgtagtacgtcactggccactggtagtggcggccaagatcggaggacctgccctcacgttccataacagtgctgccccttctccttttccagatcgatagatttttttttaatggcacagccgataatgcgtgtggtacagtggtacctgctgaattgctgattccagatctaaggccttgtttagtttccaaaatttttcaagtttcttcgtcacattaaatcttgtggcacatgtatgaagtattaaatatagataaaaaagataagtaattacacagtttacttataatttgtgagacgaattttttaaacctaattactctataattaaataataattatcaaataaaattaaaaatgctataataacgaaacttaaaaattttcgtcaactaaacaaggcctaaacacggtggtactagtagtttacggtggtgaaggagcacgcgagcgaagccgccgtctcgaacgcctgttcctgatcggtcggccacgggacgggaggccgccatgcgactgcacgtgcaccgtctaggatccagctccagtgcacgttgccctcatctcatctgtgatttgaccgcggcatgggccttgatgatgcccgttccttccttgatctgccagtgccagcctgccgctctccgctgtcaagtggcaaatcatccactgattattctgtaggcgcatcagtgcacccctctgacggccattaacacaataacctactaagctgccaccaggtcgtccacgctgaagtgtgggccccgggcccacatgtcaacccccctcccccccccccttggagtatgtcctatccgctcaagagcgccgccgacttctgctgctccgcgcaggcagggcgcagggccaaactgtccttgacacgtgggcccggcgagctaacgtggggccgtcgcccccgtgggagttaggacacgggacggggaggggtcgcgggcctttgcggctaaacaaaacaaaggcctctccgtcacagcgcagcggcgcagagcttcacgctctcctcccacgcagccagcgctccagcagcgtcgtccctcgtccgtccccgtccctcagcctctccgctttcgtctagccctctcatcgccatctctggcgcggcggcggcgtctgtagcggcggagcaagagcggagcggagcctcgccccggccgcggcattggaggaaggcagcagcagcattggctacgggaaccgggaaaggaggcactgaataggtagaagcttcgggaacctgccggatccagatccgaatccgcgctgccgacagttgctgcagcactggtttcgctaatgcttcggtgggattttggatcttttcttaccttatttttgttctttttttttcttccttttctgaagttttagggcaacgtagcttgctctagagatggaggacctgttgggttcggagatcgggaagaacgactacgattggtgagtatcagcttacctgcctgctctgcttttcccctgtctagatttttttttattttttgaggaaacatttccctgtctagtcgttctagttttttttaatgggtgcgtgtttatgatctgtcaactgaagagagggttaatgcagtacaagagctgtattccccccttggattgacttcaactgcccagctttgggaaagtatttgtacggatcgctgctttgaatgagctgaagcttgtccatattaaggccttgtttagttcgcaaaaattttcaaaatttcccgtcacatcgaatctttggtagcatgcatggaacattaaataaagataaaaataaaaactaattacacagtttatctgaaatttatgagataaatcttttgagcctagttactccgtgattagacaatgtttgtcaaataaaaacgaaagtgctacagtagccaaaaaacaaaattttgccaactaaacaaggcctaactaatgaggggggactagagagtatattgaactgctttggtgttcgatgaatcgctgtttgaatgattgaggaagcctgatcttggaggctgccgtatcgcccaagatcatgtcggtttttttaggtggtgattgaatgattgttgtgatggatgtgaggtgatctttctgctaaagatgactttgtaggcagtggtggttgttgggaggaaatgtgtcgctgtgcaaagaaaagctgaaacacacgatatgcaagggagctgattgtcctgtgtgggctctctcttcccttgcaaaatccaacttggatatcggtgattggcatgcaacaaatgtttttacacaattataaattgcatggaagaagtatggctgaaaagattgaaatttatttagagaatcctattgttggtgaggtaggtccgaggcatctgataaaggccaatttgatgcatgaccatgttgcaaaagaagggccagttgtcacgggtccaacataccatttgcagtgttttccctcacagtatttcttgatattttgatcgattttggctgcaaagaattcgtttcctgcttactaattggttgtttgttttctgtagttatactgtacatatcatcttttttcccccctactctaacctatgcttcgtgctgtacaggcttctaactcctcctgggaccccacgtgttcctgcactggaggttgctgagaaaacaccatcctcaaatatattaccaaaacgcactacaactagatcgtcctcaactactagagcatctagggtatgctacattttggtgcttaaaagttaaatgtgttaatctttgaaggttttcccttgcaaactgatcaaaatgttactgttctgagcagtatttttctaggaatcatgtttcttatacacgaggtagagatgacacgtatgaatcattttgacctactaatgagaatagccttggcaacagataatttatgagatataactctaagcagcactgtggtctgcaatgttttgcaatcttactcgccaactcatttcttttggaatgaagtggtttattcttactctcagttagtaaatggggctttactttagcattcgatcatacacaaaactattttgcactatcaaggctgtcaagaaatagcaatagtgtatttatttagtaaatttaatgctggactttactatttaccctggaaactttgtaatagtaatagaaatcaaatacctctctttatctactaactatacaaacaatagttgcattactttatggcctacctagtctactgattataataatcattttcatttgcagctttcaatatctcaaacagagaatgggcattcgacggttcccactagaccagcaagaagtaactctgttagccgatcatctatccagtcggctctcatgaatggcaacaataggacatcagttctgaatacaagcatttcttcagtcacttcaagacctacaacccctagtaggcgaagcagcacggttatcgcaccgaaacaatcagttccagctgcacgtccagtgcctgcaagatcctctactcctgttaaaactcgtccatctacaccagcaaaaactcgcccatctactcctacgagaactcgtccaacagcaccaaactcttcaactgattcggctgctgccaagaccacatccacacatagtgtgaggccatcaactccaaattcccggtcccgtattgttcccaactcatcttcaagtgcaactcatgcaataagccgcccgagcgcctcctcgggtacaacaagcagaccagggtcttcctcaggtaatgttcctgggataagccgtgccacctcattgtcctcaagttcggttccttcaatgagccgttccagttcacgatcatctacacctacacgccagcctgcaattcgttcatcagctccatctattggtcgttctccttctgttggacggaattctagtatgaacggctttacatctgcgtcccgttctgcagccagtggtggccggaactcagcaccttcatcagctccatcatcacgtccaagttctccgaatccacgaccccgagctccagtgcgaccacttgatatccccgattttccaaatgaaactccaccaaatctaaggacaaaattacctgaaagaccactatccgctggcagatcacggccaggaatggctttaggcataagatcaaccccaaatactgaaccttcagctgcttcagctcctgtgaagaaggtctctgtgcctgctgttagtcgaagtaaattttctgatacatcatcaaagacctctactctcacaaatggacaccaaaatcgacaggctgaaaggtccactattgacagtcaagctaatagaccctcaagacctatcacaggcacagataatggatttgggaggtcgatatcaaagagatcacttgacatggctatcaagcacatggtatgttccttgtgttcatatcagctaccatcctgcattttatttttggtgttgtgttcttatcaattgaattacttagtttgctaccttctaaaactgtttatctactttggacctatcaagattcaaatcttttgcatttagtcaaaattgtcatgcccatttcttaggaaacattttgcaagtccatgcatctcattttcaagtggacaaataatcactgcaagtgaaatattcacaaatacagattgactgtgtgtcaccaagtcatctcttctatatgttatataaaaccaaaacaaaagtagcaaaatgttctttggtggtattatactaaaatattcaaataaacattggacgggaaatcacattttgcatccgtaagtggtgacttcatctcaagtgatgtatgtctctaaagtttgttaagttagtccttttagagatgatctgtcttggttgaaaattgaaacattgcatagataatagattggactgaaatactgaatgatgcatgagtgttggaagaagctaagctatcactacattgacaggacattcggcagaacttgggtggcattcgtggtgcatccctgtttccccagagcattcgctcggctgctgccaaggtccgtccagctcgggcatcagacccggggcatggcatcacaaacagcgaccatcactatattgacaatgcaagtagcgtgaacggacacctctctggggactcaaatggggctctctcacgcaatggtggcagctcaacggattcgccagacagggggagcatcggaaccaaggagaccctgagcgagctggacatctatggtagctcgcgctatgaagcaatgctgctgagggaggacgtgcgcaacacaagctggctgcatggattcgatgacaagcctgaccaaagcccgctgtttgaccaccggttcgagccgctgccagagcccttcagcccgttatgacagctgctgcttgtaaagtatgatcatcactagctcttcgttctgtgctccttttgtgctgcaagatgtgtatgatttcttctgttttctgtcctataattggttggttctgcacttcccccaatcccaaagacgttgagattgcggggtttgagtctattgatttgtccatggagattggttttccactttccacgaattgttgtactgaaagaaagaaaaaagatctataaagaaacaaaaacagtaaaagatttgtaacttgcaagttattgtaatgcttggatgctcgctcgtgtgatcccgtcatttatgtgctcggttcactgtagatgcttcttgtttagttgttactcgttacagtacttatgagtacagctgcccacccaagcagctcgggcctcacgggtgaagatggtaatttttactcgaaacccgatgggtaattacctcattagggtaagtgtatggctattttttttacccatgggtaagacaatagaaaaaaaaactttaccaagcggataaaacgggtaagggtatgtgactgcattgcccatgagtaaacgtaattttaacccgattcaataaattagaataatgggtcaaaatcaccatacacaacccaagcccaataaaatcatatataagcccaataaaatcatatataatgctctcaaaccctaggccctcaccttagtacctcacccatccgctccctcccctttcccctatctccttgcggcggccacacaacacaggaacttgagaattgtgccacttgttatctagtaatgatagatttatc

SEQ ID NO: 4953 - DNA, 5547 bp, Sorghum bicolor
  misc_feature (1)..(127): n is a, c, g, or t
nnnnnnnnnnnnnnnnnnnnnnnnnnnnnnnnnnnnnnnnnnnnnnnnnnnnnnnnnnnnnnnnnnnnnnnnnnnnnnnnnnnnnnnnnnnnnnnnnnnnnnnnnnnnnnnnnnnnnnnnnnnnnnnccacaccgcacacgtgctcgctcgcctttccgcggggcgggggcgagggcgagggcgagggcgagccatgccacgccgtgcatgcggctgcgtgtcagcgtgcgcgctcggcgctcggcgagacgaaggcttgggccgggcctgctgggggcacgcattggatgctctgctccagtgctggggtgcgggggcgaccacgtagtacgtccgcgcgcggcagcgcatgttggcggggtaggttgcggtgcgcccgtgcgggggggcacgttgagtgggtaaccggtgaggcggtgcgtgccagtatttgatgccgttcagcggttgccggttggcgaggaagatatacggcgctccgtttactctacaccaggcaacaacaaaaaaagtgaggcagcagtgagttcagaaacatccatggcgcctcgagactgaccttttcttttaacccaagtaggcaactagtatgttctcaaaaaaaaaaaagtaggcaactagtagtagcctctgtaaactcagcgtacagacagtgtacagctacaatacgcacgcacgcagtagaaaaaggagttaaaaaaaaacgtcggagcctctagtccccgggcgctatacgccgcctgcgacgcccccaccagcgttgttgccacggtcaccacggccgggtgaaaactggaaaagggcgcctgattcacccaagacaacccgcctccgcctgtgttctcttctctcccacccgggcgctcgctttccatgcccccctgccccgtgtaaagcagcaatattttggggggcttttggcacaaatccaggcggccctgtcacccaccggatcccccccccacccccgcccccgcacacccacaccggacggattccacgacaaacgcggccacgtctgtttgttttgtcccacggcgacaccagccatttcctttgggcctttttcttttccgccgggacgacgacgccgatcgcaacacattcacaccattcgaatggtcacggtggtcggcggtcgctgtcggagcccttcgatctgtaggaacttccttgggccgagatatggagaacagcgacacttttcccaatatctttctgctactcgttcgtttgccaggacaagcaagctcggcaagtctagtcaggtagagagagaagttaggttcgcagtagaacctatctatatgggtttataaattcttgatttgacgtggttgctcgtttttaaaagtttggtgtgtaaagtagtgtttcgtttagagacatctagaaataggatggtcttgtcattgattttctggaacgggatgatcttattttttgtttgattcagtgaaatagaatgacttataaattaatagtttatttcttggtttattcagagaaataaaatgaatgtatcaaaaaaactcaaaacgacttataatcttgaacgtatagtttagaaagatacatatgaataaacatatttaattctttataaacatttatcaagaaagcgctcaatgttattgctatgtgaatctggatcctagctagaccctatcttttcacaaaatttacaattaaagatggggaatccaggatgtaaagagattggaagacataaaacaaattagtttatttcttgctccaatataatatatacaggacctcgaacggcccatcctgttgccgtgggcgcccagattttcgaacagcgcctactggaaacgatccagcccatcaggaaaagggcgacacacagaggcccaaacaaaaagccccatagtaagccagtggcccaccacgaggtgcccttccactcagagaatccgaaaagcccggcccgcaccgcctcatccacccaaaggcacctctctctgcctgtgtgtccattggctgacgccgcgaccgcccccaatccacctgcccctcttcggagatctcaccgccgccgtcgacctccgtcgttccccctcctactcagcgtccggcttacccgatggcgcggctgcactggctcgaggccgtcctgccgctgggaatcatcggcggcatgctctgcatcatgggcaacgcccagtatttcatccacaaggccgcgcacggcagggtacgcgctcgtcccctcccctccccccctgtctcccggttcgaatcctacacagtgctgacgcgcgctgctggttctatcctgtgtgtatggatgcagccgaagcacatcgggaacgatatgtgggacgtcgccatggagcgccgcgacaagaagctcatggagcagtcctccggcaattaggtgtggatctggtctcttgcctctgatctccatggatgtttgctaggattcccctttggtgtcggcctccaggggtgcgcgactctggtggaattcgtggtgcgttgctgcgggatgattctagggtttgggctccatttggaattcgtggtttgggctgggttaggataggttaggaatttaactctcttgtggcccgaggatagaggagggagggggtgttattttagtggttgaaatggtttgcgtattctgaatttgttgttactttgtgccaaccgaaacttccttggtcactgcaatggaattgtggaaatgggagagcgtcaggttgttcccatatcaatagtctgctcgttgaagtgtatggagctggacaccagtagcaccagtagactgtagttagctacttatctctctacaaggaacccttctatccaacagattccagtgcatatttaaaactacaatctcttaacaaaaaaaatatttattcagcttgtggctgctttcacctttctttgcttcatttttgcctcaatatttaagtttgggtggcacactgtaattattcacaaaaatagggtttggactcgatttggggcttgattaggttgtaaatcgccccctcttgttgtccgaggaggcgatttaatcaagtggtggaaatagggcaattccgtggcactcttgagtgtcgattggcgacttctctgtgatctcaacaaggattggaaagccgcaggctattatttctgttgcactagtactccctctcttcaaaattataagacatcttgacttttttagatgcattgcttttattaggtatctagacaagtgtatatctaatttcatagcaaaagctatgtatctagaacagccaaaacatcttagaatttggaatggagggagtacttcttttcaatcatattatgttaggcaaacatagtttgatctctgaaacaacaggactgatgttgccaacacatccctaagtcctctgtaccataaacaacaagactgatgttgccaacacatccctaaatcctctgtaccataaacaacaagactgagttgccaaattaccatgagattgactggatgtaatagatcctgtcaagagatgattttcagcccttgtatcattattgtgcatgcctatagatgcccagatgggccaagccaattgggtcggcacgaggccctgctattttggctcgatccaagcatggcttggcccgtccgatttgtcgtgccgtcaggctggcacgtacatggttcgataaagagctaaaaaatatctctcccatatcagcctctcatatcgttatccatacaacaaacaccaaactctaggactccaggagcctctcgtttatcttgcctctcatctatatctctcactcccactcacggtatacaacctgcaccatccccatggcaaagaaggggccgaagagcaagcacttccacccacagaccagctagggagaggagtggccgtgtgcaccaccaacagcagccacgcgtgatgcacagggagaacgtgggatggggcggcgtggtgcgtacatgagggtgagtcgcagtcccactaggtggcaggagacaagcacagcgtgtggggagggtatgggtgtgtggctgcggggaagacgacgtggtgtcaactgcaggaggcgagactggcagggtggagaggtgacgggctgttggaagcctcccgggtcgtgcaatgccttgggctggtctggtacagcataatagctggccgtgccatgccttagccgtcgggtatgcccatgggcgtgcatggcagggcccacctcctccctcgtgacgttcctaatcacactcagtgctgggctgggctgtctgtttggccatttatatgtatgtctacttgtctagggctctagatagtattacatagacaaaacaagaaactgaatgaatagttcgtttgatattgtattctactactattctttttctacaagctccctcacccccttatatatttataaccctctattagtagcctctattctattgttattagataaggaaaaaacaaaaaaaataaagcttaactattagtagatgcagcgtttatccaaaacatggatgatcatgcacttgatttatgatttcttgtacttgtcttctgctggtaagattttgtgatgtcctgtggacctcctttaacttattgatacacgctcactgtagttgtttgttagcattgtcaataatgtaatacaagatcactgaatgaaattgttatgcacatttctgcagggtattgatcaacctcaaacttttctggatgttgacgaacctctttcaaaagcacagaagtactgctctttagtttcctgtacaatgggaaccaaggcttaattgttttgctttgaaatatcaacagtttggagaataatctgtatctgacatctgtttaattgaacaaagccaaatcctttgtcaattgcgtaccacatttctttccgcctctggagcagatcgatgaacaagaaaaatacattttgcaattgttttgactttttgtaagtatatatattttgatctgtccattttggatccaacgggggtagatctgaatgatataagcatattcttctaaaattaaacaagcttccgatggtatttttcatcaaggaaaaatgccagtgaacagatgtgcagaagagcacaataagcgagaaaactacaatgttactgattcgcggcaatcactcatctgaaagaatatttggtcactagatataagcgcaacatctgaaagtagaatatttgttcaacaatagtttctttatttccaccctgagtccctgatcaggtgaattagaatttacattcaacaaaatcccaatgacaaaaacagaaacgaaagaccgtcaaccatccctcgtcgtttctggcgaagaaccatcgtcagccttgaagctccggggcgactcgtttgtgttgccgccgctgtttgtgctcagcatcctaggggattcgctagcagcaattccgacgccgctgtttgtgttcagcatccgcggcgattcgtggccaggggtgccgccgctgttcgtgttcagcatccgcggcgattcgtggtcaggggtgccgc

SEQ ID NO: 4954 - DNA, 4578 bp, Sorghum bicolor
caatttagccattcaaaatagagaagtcccacaacagcttgtctaaattggctttctatttcttgaacatgcttccacatcataggcttgaattaaactgaaacgacgcatatcgtcgagcacctctggggcgtggacaccgacgacgctcgggcagccgctggtgctgaaggttttgaacggagcaggcatatcacctctctccgcaaggcattcacctccccgcacatcccggcagcgccgactcaatgtgtctcctcgacttgcctcattgttgctgccactacgggctacggcggcggcggcggcggcagccaatcttgctttggccttcgtctcaagagtagcagcttgcttgactttgggtggtgttgctcttgacgcccgcgcctgcacagctgcagagcccacgaatgagtgttgttgccatgacgattgctgctcgcaacttgttgccataacaatggcggtggcgctcggcacgacggcaggatggatcggcgtcggcactagtgggggcaggggctaggacagccgtggcacttgacaggcagggcccatggtggataggatggcgagccaaggccgctcgcttcttctcccgagcgacaaaaacggaatagctacttttgtattttagaaatcccgttagcgaggctattggagcctaattttctctaattttgtctaaacagggtaggatagctaacctgttggagatgctctaatgccttctttacttccactcaaaacccaaattttttcaaaattctttatcacatcaaatttttagacgcatgcatgaagtattaaatatagataaaaataaaaactaattacatagtttggtcgaaattttcgagacgatttttttgagtctagttagtctatgattggacaataattaccacaaacaaacgaaaatactacagtgtcgcgaaattttttcatcaccaactaaacacagcctaaaacgaggtggaatggaatcccttttcgccgtattccagaagctgaaggtcgactagggagtagggaccggcggcagacgcaacctggaagcgtccgttggaaatggacggcctcgtgcgcggtcaatggcttgctgtgccacctttacccgtacaaatcgtgttgcgctgtaccggaaatttcttcggacatggccctgcaaatgcaaggccttatttagttctaaaattttttataaaatagtaatagtagcattttcgtttgtatttgacaaaaatattgtccaatcatgaactaactaggctcaaaagattcatctcatcaattccgactaaactgtacaattagtttttatttttgtctatatttaatactccatacatacgtttaaagatttgatgtgacagagaatctgaaaaattttacaaattttttttgaactaaacaacgcccaagaaccagctcaatccggtatcctactactttggttttcctccacggttgtttttttagttaaaaaatgagagacgagtatgatataagtttacttgatatacaataatagaataatagtggtatgtttactagtttatatatatatatatatatgcagaaaaataaacaattaggaaaagccaacaacagttggggcaggaggattagctggtaggcacctttgcctgaaagtgaggttttatcagccaaactgcaaatgtatttacaggcactgaaaaaaactccccgaagaaaagcgaaaaaggagcagagcaattgtatgcttccaagtcataacaatctttattggttggagatttgcgcctggttcaaataaaaaaaaaaatatctctcctccatttggaaacaggcgacgatgacggccagggagtaaagaaatccagcatagcatgccagccacctgccccgtaacttctttgttgtttgttccccttcatcatcctactactcccgttccgccgaagctaccgaggacgggcgcacgcaggcggaggaccagcgccgtcgtccaatccgcatccgctagtagggggaacagccggcagcgcgaaggtcagtcgtctcgtctcttcgcgcgagccctccctccctgtttttttctttcctcttcctactactaaaaaggaaggtggtttctgttctgtgggggcgattggttccggtgcccgaaatcaagaacccggagccggtttgttttgggccctttggataatatatcttgtgctgtctgataaaagggatcgcttttgctgcttgatagattggggatttcttgagggaattgttcggtggggaagatgagtttgcgaatagtgcaatgtgagtgaatcaatcctgagaggacaggacagggaattagttttgtgctgtggtttgcgcgaaccacaatgacttgtgatgggggctctcaataccttcttttggaatagaatcttgttcttcaaatagaaagtgtggaattgggaccctattcttgaactaagaatctcgactcctaatctctgccttcccccgtctagaagatctgccagtgctgcctcgtctacaagtgggtcttctctgtaggacagcttgctgctcctgttcctatagagctgaagtgaatagagttttaatatctgtattagatgtaaacttaactttgttcttattcttgataccgaattattataagatctccatgcctgccattactgagtgaagttcagtcacagatggccactgtattcatcttgtttcatctcttcttggtaaagttgttgtagatgctgcacttactctcgtcaatgatgagttgtatcccatggttattcgcttgggaatcagtgcatatttccctttttattcatattgcactgttgacaccttttgtctctgtgcaatacttgatcggcagcaaggatttggaggatgacagaagctgcagttacaaggtactggtgccatggatgtgagaaggccattgaggaggccatgggggaggagatcaagtgcccattctgtgatggtggattcattgaagagatgatcggggaggaatttgaggggttggtcagtcagcagtcagagcgggatttatcacaatggggaacgtcaaacaacccttttgagcagccaggatcggcagcagacagtgaggatgaagatgacgacgatgatgatataggccgtgaatttgagggtttcatcaggaggcatggacgagcatcagctctgcgtcgtgtgcttgacagcatccaggatgaccttagagctgacagggaaagggaccactccgttctgatcaatgccttcaaccaagccctcgctctgcaaggctcggtacttgacgctgatgaggctcgagatgaccaaggtggatctaacaatgatgatggcttgcttgaagaatatgtcctgggggctgggctgagcctgctgcttcaacatttggctgagaatgacccaaaccggtatggcacccctcctgcaaagaaagaggcggttgaagctctgcccactgtccaaatagcagaggttgtcagctgttcagtctgccttgatgatcttgagctggggtcccatgcaaagcagatgccttgcgagcataagttccactctccttgtatcctgccatggcttgaactccatagctcctgccctgtgtgccggtttgagctgccatctgaagagacgaaagatttgaatgagcctagcaatgtcgacagaacagagagcacccaagaggaagtcagggctgatggccctgaaaatgacagtgagagcagtaacagagcatgggcccttgttccttggttcagtgggctattctcaacacctgaaccgcaaactgccagaggcgctttcaccgatcaacagactccatccgcttctggaaccaacccgaatgctggggaaagttgatttcttcctcctttgtgaataatgctcatacatctaagaatagcaatgaaccttgtcagtagatgacttatttttctgtactgacaatcattggatggatcgcaaggtacaaagtttgtggctgttctgttttgccaggattttagcgatcatttcacctttaattaatttcatagctactgagcctatgcgatcatttgctttctatgttgttggctctgaaaattccattcatgtttattgtcttgaactagtgctagtcgtaaaacgtttgtgattcatgaacaccagtagaggtaaacctcgtcatgttcagagatgacactaaacattctcggggagaatatgtcggcaaggaagtacagatatcaatactacgcaaggctacctgttgaaatagtgtgaccaaatttacacatcgggttaaaagtattaagattttctggctgtgtttgttgctctgatgggatgtctttgagctatttctggaatatgttggtcttataaaccatcatgcctgggatttatagctggcccgtgcttataccagttaaaatatatcgtcatatcaagtatctgctggctgaacatgaagagaattacccctatgggaatccgttctattgatgctgcacatgttatacaacaagctttagggcttgttttggctgcactgcaatccacctc

SEQ ID NO: 4955 - DNA, 13866 bp, Sorghum bicolor
ataactgtagttagcttggaaacttgtatagtacggtgcagtcgttgtacacactgtcttgtctttgtgtgtggctattgtaaaacattttgcctctttttttttttctgtccctgcgtttgacctaagattctgaaaattcactcacagattatgaattttcaaaaattgtttatataaataaaagacaaggacaaatgctaagttacactctttacctactaggaggtaatatctcagataaatctgagcagttgatttgttttcagattttatgaattacttaataaattaaaaaatctagaaaaacaaaaatacttcctcggcattcctctaatgatgggaggagaattcctttaatcacaggagaaacaaaataccggcagccgaacgaagccaattccccttatcacgtgagaaacaaaaagcattgattcatttccctctccgtgcacgcagcacacacgacaggtgcatggtcgagcgggcagattggcgtccggtgcacgtcggtcgccctcgtgcgataccgccgacgagccatcctcaggccttgtttagggccttgtttagttcaaaaaaaaattacaaattttttcagattccttgtcacatcgaatctttagacgtatcatggagtactaaatttagacaaagataaaaactaattacacagtttggtcggaattgatgagacaaatcttttgagcctagttaatccttggacaatatttgtcaaatacaaacgaaaatgctacagtgtggatttctcaaattttttggaactaaataaggcctagatttgattttttttttgaaatttgaccctgtagtattttcgtttttatttgataaacattgtccaatcatagagtaactaggtttaaaagattcgtctcgcgatttacagacaaactgtgcaattagtttttgttttcatctatatttaatgctctatgcatatatcacaatatttgatgtgacagagaatcttgaaatttttttggtttttggagtgaactaaacgaggcctctattttcaaccaggcgtgcacctcttcttctagtcggctacaataaaacaaccaaccaaacagccacgggttacatggtatatgtgtgaccaaagccagctaggcttatccccctcacctaagcccaaagaagccatctaaccaaacacatagttgcgaagttgctgggagcagtccgtttgcttgtcttatcaatcatactttttctgcagccatgacttttcagatgggcaaatagaagccgtgaaatctcgagtgagtagaagcacgtagtccgagcaaggaatctatcatgtgtggtggcgtggctaaatacttgaggcaaaacaaactaataccattcatatcttgaaaaaatagtgtagaagagttttattcctatgtaactctcttcacttctatgaaactcttatcatctctctttattaatacaatgctacattaatatatttaatatctataaaactctgataaaacaccattcaaactgacgtaacaaacaagatgataactttagcctagttcctcctgccagcttgatctgggggttatttttgttctgccccactccgccccttttttttttgagtggactgccccacttcttcgagctgtctgcagcagtttgcgtacgggcctggaatcactcaaacagcccaacatttcatcttttttttttttggcctgaaacacctccgaattccgcagcgcgaggacgaaaccctcgcaccgtttcagttttccctccaaaacttgccccaaatatccaaatccacgctccctcgcagtcgcttcaactttccccgtccccccgcatccaccctgtgcccttctcgccgcctcgattccgtttctgtgctcggctagggagagcggcggagtatcgggctggtgacctctacctcgccgcggcggggcggcggcgctcgcagtccctcgcttgctgctgcattttccaatactgagatggccatggagatctccccgacgcagtcgccaccgcggacgccgcgtagggcggcgaagccgcggctgttcatcaaggagatggtcctccgcaacttcaagtcctacgcaggggagcagcgcatcggtcctttccacaaggtctcctcttctctctctctctctcacacacacacacacacacacacacacattcacacacgcccactctcgtgggtgctaacaatttgtatagatttagaaatcctaggggcgaagtttgcattgttgcaatacattttacatcaacctgtgcctatggaaacttaatctacttgtgcactatgtcatagcttcaattttgctgttctgccccacctccaatttatgtcattgttccccgatgaagaaacgttaatacggtagttatttgtggttgctagtggcagccaagtcgtgatcccagaaatctcagtggaacttctgtagctagtattggcttacatgtgagtgtggggatggctttaattccaaaccctagggtacagttcacagtgtagtgttgtcattctacaaactcagttttattggtacaattgttaacacagatcacttttgattgtgatacataaacatacaacacaaatggagcttccatgcagttctgtagattttgtcatgattatgcttgcatatttaaggaagtaccggtattacaacaaaactcattgtttagcttttacttcccattttgttaaagctatggtcctaaagtaactgatccttcactctgcagaaagtattgcaattcatataaaaagtaaaactggatctaaacatagattcaggcgtgtttgagagggcttcttaaggctttggctccttgctgtagtatccaaaaaagccggaaccagagctggtgaagacagtttttctggcttcactgacttctagttcattttggaaatagagagaaaaatggctccctgctacagtgcagaatattccctagtagccggagagaatccctcctaaacgggtcatagataacataccaggattcctgaggacacataccttttttgttatcaatctaatcctagaaacatcgctataatcaaacacaaacaaaacaatagttcttcaggatacagaaattacacaccaaggtcatgtaatagtgctcatgttcaataggatggaaataattccattattttttctccaaatgtatccattgaacaatgattgaagacaaaacaatagaaatataatttcttatcttggttgcagagcttctccgctgttgttgggccaaatggcagtggaaagagtaatgtcattgatgcaatgctttttgtgtttgggaagcgtgcaaagcaggttggtactgttgcttgatgttgatttcttttttagtggttatcactatactcatttagttcatctcactggcggattttatgttatttgttctatgtcgacaaatcatttgatttgtttatagccttccaatggtagattttagcatgtcactctaagttccacaatataatttaaaaggttgagagcaatatcctggcatttaagtatgtaaacatataagttattgtcttaactattatttgaaaggattattctagaacctagcacattgatgctttatgcttcaatcgtattaatcctcttcttttagataataatcgttttaatcctctggttgccaagtagtctgtgttttgaagttgacactttagagttgttgcctggtagtacactggtttctcatcactgttccctgttttccctttgaactttacatggacaatgcaaaatttcacaaatttgttcatacaggtgatccaattcatttttttcttatcaatatccctgcttttaaagaaaggaaaaaaaatgtttgaaatacaaaccccactgggattaccagtgcacaaggaacacaaacttatatggaaataaaattgatccaatccattgttagttgctatcattacttaggttaatttttgtattccttttgttccagctatatattctgttcatgattagttcttccattaactgcagatgcgcctaaataaggtctccgagctcatacacaattcttccaatcatcagaacctagacagtgctggtgtttctgttcattttcaagaaatcattgacatggtatcatttgagtcttgagttgagtatttgacatttcttatttgtactgccaataattattctactttctctgtggctgtatggaggatgatgggaactacaatgctgttgagggtagtgactttgtcatctcaagggttgctttccgtgacaacacttctaaatactacataaatgagcgtggaagcaatttcactgaagtaactaaactgctgaagggcaagggagttgaccttgataataatcgctttctcatcctccaggttttgtgtgttcttcacatattacacatgaatatgagaaactattgaagtgtaatttgtaggtccttcagatttggtttcatcactcacatttccacttctcttgcatagcttctttgtttaagtctgcatgaatttattgtgcaattccaattatgttttctgcttttacaattgcataacctctgaagtgggcactgtacagggtgaggttgagcaaatctccctaatgaaaccaaagtctcaaggtccacatgatgaaggttttctggagtatcttgaagacataatagggacaaaccagtatgttgaaaaaattgaagaagcgtacaagcagtgagtttctgacagtttttttgatgcatgctgttataactagtgctttatatctattttgcaacgatttagtttcttaccttgttatggatctgttagacttgaagtgctcaatgaaaagcgaacagcatcagtgcagatgctaaaattagctgagaaggaaagagacagtttagaggtgctgatctaagtgtttatgatttcactattcactatttggccatttaaccactactaatggagttactttcctgtagagtgcaaaaaatgaagctgaaacatacatgctgaaggaactttcgcttctgaaatggcaagaaaaggcaacgaagctggcttctgatgatgctatctcacatgttaatcaatgtcaagagaatgtggcagacctggaaaagaatcttgcctccgaaaggttatttgttacagatggacagttttccccctcccctttacatgtttcctgagtaagcatattggctataatccagggagaagatacagcagaattctcaaactctgaaggaaatggagtctatttacaatagacatgtcaaaaggcaagaggtattgtctcaacttaccatttctttaacctaatcagccattgagttaaagtcatttatttcctatatttgaaggttacaaaaaacacattattttctgtcacaaggttagtgcgaatgggcctaaacagccaacaaatagtgtccctatttttatttgcttcttgtatatctttaggaccttgaaaataacatgaagagctgcaaggaccagtttaaagagtttgagaggaaagatgtaaaatacagggaagatttaaagcatcttaagcagaatatcaagaagctggatgacaaagctgaaaaggtaatactgaaatggtttcaattgtaacactcaaattatagttgaagcaagactggctaattgtttcacctacattctaacacaggatacatcaaaatgtgatgaaaaaacaaaagagatagaggagtcatccaatctcattccacagctggaggcagaaatacccaaattgcaagagcgacttaatgaagaagagaaagtcttagagcagatcaaagcatcctctcgaggtgatgttagcttacagtatccatgttcattgaattattctgtctgataactaaacttttcccttttgtaattatagaacaaactgagaggcttcgtgctgaacttactcaagtacgaattgaacttgaaccatgggaaaatcaaattattgagcataaagggaggttagatgttgcatctgctgagaaaaagttaatgaaacaaaaggtaggccttctatgcaccccacccccttctttttgggaaacaagaagactgctgtcaagtactccctccattccaaattataaggcattctaatcttggagagtcaaaacatctcaagtttgaccaattatagagagaattaaaaagacttatgacatcaaataggtatactataaaaatatagttaatgaagaatctaatgatatttctttgacatcgtaaatgttattatcttatcacatatgtttggtcaaacttgagatggtttgactctccaagattcttagaatgacttatttgggatggagtacttcaattcgctttgagtccttcagttggagatatatgatgccctgaccacaagcaaaaaatctttgatttcttatgagcaataactttttccattaacctgggcttaccaagcctgacactgacactgacattgcaagctttgttgtacaactaaatccacttacccttttagtttgtttgagaaacatcaatttgatatattttttttttcaattttgtccattgcatttgaacttagttccctgttttcagcaagatgcagctcaagcagaattaactgatgcacaaaatcagatggaaagtataaaggagaaagttgaaacaaaggattcatacattgtagagcttcaagaaaaaatagagaaacaccagaatgaagcatctgaagctcgcaaaattgaacaggtaaattacttccagcttaattttgaaccaaacccatgctctgagttcccttaagtttagtcattacttacgtggagtatgctgagagtctcctgaatgtattgctcgcaaaatttgttgcaggaatgccaaaaacaggaggattcactgatccctcgggaacaagccgcaaggcagacagttgcagagatgaaaaccactagggattctgagaagaaccaaagtactgctctgaaagcaattttgcaagccaaggaatcaaatgaaatacaaggcatttatggtaggcttggtgatcttggagcaattgatggtaagatatactccctctgccaacaaaataaaagatgtcctatgatgtgtgttgcctgactgttatgtatttcacagcacatactaggatcaatatgtggatttaatggctataaactgttatgtataatttttctatatatagtaatttctgtaacactaaattgagttgcatgcactaaccagttcaacccaaaagcttaagctgatgaggagaggtgggcaattcacttatattccaacactccccctcacgtgaaggctccctcaggcctcagacgtggaataggagtgagcaacaattattttatttaattgcgctaaccaggattcgaactcgagacctctggttttgataccatattgagttgcatgcaccaaccagttcaacccaaaagcttcagctgatggggagaggtggacaattcacttatatcccaacactaaacttcatttccacacatgttacagtaaaatataacgtcttccccttcagttttgacaaatctccatgcttcattttacagaaactgtcaataacatttgtttatcctttatttaaatgagaaggaaggacttgacctatgcctcgctcgaatctgactgctaaaatgcattggttttgccctgagatgaatgtgttgcatatggttgtggatcgcactgacacagtatgctagagactcttacagtagcatttattatattttaggttctactccctccttttcatcatcaaaacaaagttggttgttgtagttttgccctatgtcaattttatattaacatctacaatacaaaatgaatgcactatgaagactattttatggaagaattttatactgtcgatgttggtgcatttttctatgaacttggtcatactccctccgttccgttttctaaggtgtttggagtgacatggtctcctaaattactctttgaccattcatttactttatattatattgtttatcttataaacttatgaatattggatagtacaattgcttacaaatctaatcatatcaagttcgtattacaaatgttaaatattgttagccaaattattgggcaaagattttaaagtttgaatcttgatataaatgtgccttataaaagaatgtggaggtagtagttcgagaatttttacttatggcaaaactaaaccgacatacatcttggaatttaggcaataaatttagcagttgtacaaccgtaatcgctatgtttcaggtaagtttacattttccccagtatgacctttttagatgatacataaattctagggacaaataccatgccaatgtttgtttcttgatatcagtgcaggaatccccttacggatttgtatttatgtcgtttaagtctcccatcttagtatatttgattatggtttatggagatcttgtttgtaaaggcatagtcaccaagatctaggaagttatatttgctagaatccgtgaatgtcattatgcaatcatacagtgttgattgaaagcttttatgaagcatttctggatcttaattttttacaaactctggtctgcagcaaaatatgacgtggccatatcaacagcagcttcatctgggcttaattatattgtggttgaaacaataaattcagctcaagcttgtattgagttgttacgtagaaggaaccgtgacgaaactgtaacttgtttgatcctggtaacactcttttttttctgtgcttatgtgttttcagttttttacctgtaaatttcattgttgtaattggaaacttatgtcacaggaaaaacaaacacacctccttcacaaaattaaagagaaagtaaaaacacctgaaggtgttccacgcctttttgatctggtaaaggttaaagatgagaagctgaagttagccttcttccatgtcttggggaatactgttgttgcaaatgatcttgatcaggttggtccttgatttttttagtctactacttttttctcctcatgtagttgcttgtaattataatttgtgctgtgattaatggtatctcaacactgtctttgtcaggcttcgcgaattgcatatactgcagcaaaggagttccgtcgggtagttaccctgggtggtgaactatttgagaagtctggtaccatgagtggtggtggtaaaagggtacaacgaggcatgatgggaacagctatccgagaaagcttttcagaagaggctattaaaaaagctgagaatgaacttaccaagcttgttgacgaactcaacgagctgcgcgaaaaaatgaatgatgctaaaaaacactatcgatccatggaagatgctaaatcccgtcttgaaatggaattggcaaaagctaaaaaggaggtacataaaaaaaccagtgttctgcttaccttcaagtcggttgtttctggtgccttggtctgactactttcttgtcatcttttttttttacctctcaaaataggttgagagtatgaatgcacagtatatttacaatgaaaagcgactagagtctctgaaagccgcttcgcaacccaaagctgatgagcttcgcagaatgaaagagctggatggcatcatatctagtgagcaagctgaactagatagactaacaaagtgttccagcaaacttaaagatcaggcaagtgcctatacactaagtctcatttccatttccagggcatatttatctaccttgtgtctttttccctgccatttgcattcactttgctttagagtggtcacacgataaaaggggccacctctccaagttcaggactcttctgtttgaaatatttttgaatgcacctcctgatatttttagcattgttgctaaagaatcttgctttgccaccttaacctatttgtaatgtataccaggctttagaacttcaacagaaaattgaaaatgctggagggaagatgctgaaggaccagaaggcaaaagttggcaacatccaatctgtaagcatgtggccttttgcttgtattggtttcctttctttgtggcaatctgttttatggcttgattttcgtaatgtcaggaacttgacaaaacaagttcagaaatcaacagacacaaagttaacataacttcaggtgagaagttggtgaaaagattaaccaagggcattgaggaatccaagaaagatagagaaaagctttctgctgaaaaggagaatatgatgtctatattcaaagagattgagaagaaagcatttgttgttcaagaagagtataagaaaacacaggaggtatttgttccattgcattgcactcctggctgccccccaatttatttgcactctctgatcaggatttctttatttgtttttacttagatgatagacaaccataaggttgagcttgacaaaactaaggaagaatacaccaaactaaaaaaagcaatggatgaactgagagcctcggaggtatgtaatttagatcctgttaagtggtggtgtcataattctgctgtattgtttctttccacaaccttgtgtgtttggccaaaaaacaggttgacgctgagtacaaattgcaagatacaaaaaaacttgccaaggagtgggaaatgaaggtgaaaacattcaagaaaagggttgatgaaattcagacaaatgttgttaaacacatggatcagtatgtttaaatgtttcaatttttgctgtaactttgtgacttttatgctttctgtggtttcttctaatattagtatgcatttttgttttttcagaatccaaaaggatgctgttgatcctgagaaactcaaagtgactctaggtgatgagcaactaaatgacacgtgtgacatgaaaagggcaatggagatggtggcattgttggaggctcagattaaagatttgagcccaaacctggattccatagcagagtatgaatgcaggagatgccattgacaaaacagttttggtattaataatgatttcattatttctcctgattgaaccaggtaccgcacaaaggctcggttgtatggtgaccgtgttgatgagctaaatgctaccactcaggaacgtgatgatctgaaaaagttgtacgatgggttaaggaagagaaggtatgtctttctgaaaagctttagaggatccttaaactttagcagttgtgttggtcaggtttcatctcttacctgcattgtatattacttcaggctagatgaattcatggctgggttcaacataatatctctgaaactgaaggagatgtaccaggtactgaatacatacagcatcctgtagtgtagcacctttggtttacttgatgtacacagacacagaccagatcacagaaagtcgacatagtgagaaaacgagattaagctttgctcaacccttactgcaacaatgtttgtgctaactgaagtggttttatcttctggtcgtgtggcatgttgcacttgttcaaatgattttttgtattaactaacgatatggtttcagatgattactcttggaggtgatgccgaactggaacttgttgattccttagacccattttcagaaggtgttgtttttagtgtgaggcctccaaagaaaagctggaaaaacattgccaatttatctggtggtgagaaggtatgttccatacatgtagtgttgtgttagtcttgtttatttaatggacaaggatgtttccctcaaagttaattgcctagttgctgttttcacatgatattacgctttcagggtgagtcaacttgatgcataagtttgtttcggttgtttattaaaacgagttctgtaaatgacgttccagtcagaatggttaacatattgtaaaatatcagaaatattgtcaacatatttacagatctgtgtcgtttctgttgtaaagacactatcagatataagccaataaacatcatcattgctacagttaggagcctagaaggaatataaactagaaggaatataaatatgtaatttgatgtttatctgtgctgagccataattattaacagtaaatactaccagctatgatctgaattgggattgactagcactcaaaatggccgcaccattcttttttagataatggaaacatttggcttcatcctcagaggaattagaccaacttattacaaccaaatgaccggaccgagtttaacatcacaaagccaactcaaaactcaattatagtctagaattagaaggccgtacgaagatgcgaagaaacacatagcctcatatgtgcattctccaagttgtggcacgcgtccaaaaccatctttatattggagatatcattgtgcataaaagtaaagactgttacttaattataggaaattcactacctgtactgagctattttgcatacaacacaccagctagatgagtgcaacatgcaacaggcaaggccatgcccagatgttgaatatcccatctctgactgttttgccagctctgatgaatgccttgctgacagtattcatgttagctggatgcgattcaaatttgtatgcatactttatttagtgtataaaaagttaatcctttgcaggtactcttttcattccattccctctttaggaagaactaatttccttttaatttagcacttgatatgtttaggctaatccctgttgctttccaaactccttaccatctgttttagctacataaattacttcaaaattgtaacaccaatgtctctatccaaactccttgccttctgttttagctacatagattgcttaaaagttgtaacaccaatgtcgctctggaatacataccatttctgacgagcctttcatcttgcagacgcttagttcgctagctttggtgtttgctcttcaccactacaaacctactcccttatatgttatggatgagattgatgctgcgttgggtaagtcatgcaacccttctttttagtaatactgtctgtgatttcaagagattgatgcatttatctcttatagactttaagaatgtatcaattgtgggacattatgtgaaagataggaccaaagatgcacagttcatcattataaggtatttactatcagctcagtttcaatattttctttgccaatacttcacaccgtccctagaaaggtgtagtactagaaaaaagatgcatgcatatctgagatggccatgggtataatgtaaagtcacgtgttattttgcagtctgaggaacaacatgtttgaactagccgacaggttggttggtatttacaagacggacaactgcaccaagagtataacaatcaacccaggaagcttcgccgagagcatgaaagtagtgtagtatagtgtgctcagctacgggtcctgctgctaaatgtaactaccttagtgtccttcgttaaattaaccactctaaatgtaaccttgtagtatcctcgtggaaccgaggttcctcgggcgttgtggtttgccgtgcactctgcaaagcagtatgctatgtaaagtaattggcaaaagcagcatgctcaaccatttcgctcctcagtgcttttctcgcttttctcccatcttgttgaagtccagcttgacacgttggtatttaacttatagaagcagacgggcacctgaggtagatcctgggtttggattatgtcctgctttgcttcgaagcctaggtacaacgcactaatgacacttgtattgcgatgatttggaatttttttttacaaatcatttaatacgatagtgtgtaggatattcattggaataggcatcatagatacaaaagttagaaactagatgaaattcattggaataggcatcgtagatacaagacagaat

SEQ ID NO: 4956 - DNA, 4611 bp, Sorghum bicolor
atagtacgttgcaccaagttaaatctttccttaaccatagtgcttgttcctaaagacacacatgtcctaaactaaatgatatttctctctaagaacatctccatgacatgtcctatccaatattccaatctcatatatcgggaaagtagtgttttaggagatagaatagctgcaacagagctcctgtctcatctcatatacctatcatttataaaaaaaatctcttaaaagaagcatcatttccaatataggactcctatattttttttaaggacaggggagaggggttggttagtgtttttctctcataataaatcatcgaacagtatacttcacgcttttcaaagaaatcatcaaaattcaaatttgactaaatctgtgtaaaaaatataaacatttgttatactaaacaagtatggaaggatgtctctaagtatgttgagactaaatctatgtaaaaagattaacatttaataaaagtatactaatcatgtaacatatttttatagcatattatttttttatagtactaactattaatagctgtttttttcagtccacttaaacttacaaatagttcatttcttaggatgatcccaaactaaaaattctgaggtactttttatactatatatagacacaaccaaataaagacgcttcattcacaatttttttgttgtccaaccacgagttttctctatgttatcatcatctagctattacttcatttgttccgaaataactatacatcttgttttgaaataaataaatcttttaggttctattatatttgtataaattgtcaatagtatagttcctaatagtacatccgacctaaaataaatgtacatttcgcttttcaagaaataaaaaatcttttaaagcttaaccagatgcacacaaatatttgtattgtacaataagttcattagattgaggatgtaaacttatttagagatataaattttgatagtcttttctgtatttataatcaatcttaaaaaaatggactcgtcaagcaataagatgttgggtttattttaggaccgaacgagtatgtttgttataaaatactcctttcgaactaaaaaaaaagtcatttaagacggtgacacggtctctaacgcctaactttaacttcttataattataaaaatatttattagaaagtggtatgtgtatattatttttataaaaatatttttaagacaaatttattcatatagttttcacatttctaaactaaataatttagaagttattcatgatttatatttctaatgtttgaccccaaacttatccaaaataactcactttatgagtacggactgttaatttgatgatacttattatgtatattaaaagttgacttctcgagttagacgtgtggttatccaaaataattcactttatgagtacggaggagtacatactttgtgaatgttaaaagttgacttctcgagttagacgtgtggttattttgaatggaataaaaatactttgtatcttgattctcaaatttcttatatatgattttttttgttaattgcaatatcatattaccattttatttcgctaatacattcaaacaaaggccttgtttagttccgaaaacttttcggttttcggaactgtaacactttcgtttttatttgacaaacattattcaatcatggagtaactaggcttaaaagattcatctcatgatttacagataaactgtgcaattagtttttatttttatatatatttaatgctccatgcatgtgtcacaagatttgatgtgacgggaaatcttgaaaagattttggtttttggggtgaactaaacaaggccaaagattatagaaattatagactgtcttcactcttcacaaatgctttttacgacggagagtagagtacatcctcgatgatggggggtcgcagtgctgcacagcagcatggcgtagcaagctgtggcaaagcctcctgagccatcgaacggcacgcctcttcccgatgcagcgtggcagcacgcgacaggcccgtcgctgcctcacccgggccaagccgcaggaaggcaggatggcagtcaaggcctcgcgcattcccaaggccccgccggccctcctgttcccgctgccgcggcgcaggtcgccatgcccgttcccgaattttttttttctcgctatcaatgccctctgcccccgagatttggacggatcggcatcggcatccgccgcccccgcccgggcagaaaccaacgccccgcccgacgagcgctggggctctgggctgccgtgcgcgtgccgcccgctcggcgctcgctgctgcgtgctgccgcaggcgcagggtaccaaacgccccacccacccaccggatagaccgtgcgcgggtgccgatttcatggcgcccgagggcccggcgtgtgagtggccccaccgcccgttgagcggcgccgctgcagtgcgctgcgcgtagtagcagtacgtccctccgctccaaccaccgcgaaccgtgctgccccccaccacacgacacgccctctccctggtccggccccccacgtgaaccgcgcccagccgaatcgtgccccggcacgtcggcctccagctcccggggaacgcggcgcggcgcggcgcggcggcgtccctatcgaacccgccgctgggcgccggctggcagtcctcacttgcgggaccagcaagctctcagcaggccccacccgtcatgcacgagtgggtttgccggtgaagaggacgcgcggtgcgcagcgcgcacgcacccgttcacgtaccccgcatgaatagcagtagtagggggtagtacagtactcgtaccgtctcaaccggcagatgggtgggtcccgttggacagtgttcgtgcggctcgtgcgtgggtctcggcgtgaagagaagagtcatgcggccgcgcgtgccgcaggcgcggtacggcagggcggtggggtgacaggacgactggacgaggcgtccgtgctccactccaccagctcgcagtggcagccagtgcagtgtggtagggctggcgtcacggcgccagtcccgcgtcgcgccggacgagaccagtcgcacgctgtccagaacaggacgacgaggacccgcaaggcgtcagatcgcgcggcggctaggcggattcatgacgccgtgcgcttttgctctcgcgcccacgcccggtcagcgacagccgcaggcctccccagaaaaaccaacctccccgtttcacgaggcgcggccattagtgagagtgcagccacagcggccgtgtgtgagagcggagggaggaggtgcccagcccaggcagcgagccaggccagcactataaagagcttggagtgagtttactactcccaccgctgccttgccgttgccgctgccgctgccgagaccaaccaagcagctgctccctgcccggccaaccacagagctcagagggcgagagcgtgcggtgcggtgcgggtgcagcagatggactgggacatgagaggaggagggggagggcacggtggcgctgtcggggacggtggtggtgggccgggaggacgcggccttactgtcggaggcgttgctgtcgggggcggcggggaccagcaccagcagcgcgtggaggcgcactaccgcggcgtgcggaagcggccgtggggccggtacgcggcggagatccgcgacccgtggaggaagacgcgcgtgtggctgggcacctacgacacccccgtcgaggccgccatggcctacgaccgcgccgccgtcgcgctgcggggctccaaggccaggctcaacttcaccgctgggcgcggcgcctgcccccgcgccacgcccgtccaggctcgcccgttcccactctcgcacccggcggcgccaggcggccacttcgtcggcgggctcgacgtcacccactcctcgccctggcacgtcctctacctcccgcccagcaggctgcaccaccaggccgtggcggttccgccgccgatgccgcccctcgtcgcagtggcggaggacgtcgtcgcctcgtcgaagccgtccacggcgctggagctccggacggggcctaaggcactcccgttcgacctcaacgagccgccgtcgctgatgttcggctcgcgatctccatgaacgcacatggagacggaggtgatggtagatcaatagtaggatcgagtagggatcgatcatggaccattgaacccagtggtagggattgcgtagtgagggtaatcaacaggtaggagtggagatcatgggtccggttgtatatattctagtagtatatctatttaaggaaaatcttgcccttctcatcttcgttcgtgttcttgtgctccatctccttttcgtagtcgttggggggtgtcccgtcggcagcgcgcttcttcggccttcgcttgagcatttctcagctgccgcctatcgagcaatattttttctctcacaaccatggcttgagccaaacgagaagacgttcttttttttttaaacaggcaacgcgctttttgctggttattttgtttggtacatactgttgctgtgagcccttttcctttcaaacatgtcgctgtttagttgggacggagatatcgctttcatgattaacgttaaataagtatatgtgaata

SEQ ID NO: 4957 - DNA, 6863 bp, Sorghum bicolor
tgtccagcagcaattccttacttgcaagcagagcacaaacaactttggtctcgagcgaagttctcaggggagtgcaaggttgattatgtgaacaacaatatatcagaaagcttcaacaattggattaaagagaccaaagggtttcctgtggatgtcctcatggacacaattagggttatgatcatggaaaagatagctatgaggcagcatatagctaacaaacttgaagggaaaattctccctagtgttataaatgagctgaagatgaagagtagaaacttgaagtacacaattaaggggagtggtggtcttaaggccgaggtatctggattgactaaggacaactatccttggaggcatgctgtggaccttgaaagcaaaacatgttcatgtgggcaatggcatatttctggtaaaccttgcactcatgttatagcctttataggttccttgagacaaataaaactcgatgactatgtgcatgactactactcagttcatcgtttcaaggctacttatcagtttgaggtcagcccaatggttgacaagtcgcagtggcctattgttgatctcgggtttcaaatgttgcctccaaatctagaaaggtccgcaggtaggccacgagtgaaaaggattaagagcaagggtgagcctggaaaaaggggtccttatcaatgcaaaagatgtttccaatttgggcacattgagaagggttgtcgtgagccccctactgagcttggtgttgaattaccgcaaccagtaccgcctaaatctcggtaaactaattttatgctcctatcacttagtacaatacaaaatcttttagagtataattgattaccttgttgttatgtaggaaaaggaaagaaaaaccaagtatttcaaactccaccaaagctcccaagaaatctaagaaggcacctgcagccgtgtctacttccttagtcacacaaacaccggttagtccaggaccaacaacgaggttgatggcagcttctacttctagtcctcttagtccagggcctacaacaaggagtagggcagcagcagaaacgtcaccaggaggtattgcgaggcgacttattgtaggctaggattggatttgtaagagtaaagcctgtgtggtgccactattattttctagctagtgttggtgttattggacctttctgtgctggcagactttaaactatggagtgtttccatgaatgtaatgtgttgcgatgacaattctaatgtgctggaatgattgtccttgtgtatgtgttaaatggtaaaaatggtgttagatgaatctgtctatatgtgttgttaatatgtggatggattcaggtgcttaattatctgttcatatgtgctaggttcaacctattactatgtgttggggtcatgtattcacgttctactgatttgagggtattttggtctcatttaacggctcagctgttgaaaactgacggaatgctattttcagttcgcagtggcaactttcagtggtattttacgaggctgaaatctttcgatggtattttacggaggtcgtaacctttcgatgctatagaaccaatttatgctatttgttatgctacactttattccgaggacaggctccttcaatttttggtgcattcgatacagttcaatgcgagagctctcgtatgaattgattttcggctacaaaatttatcatctccttaacctaatccgtttgaattctacaacagcatccgaacacaaaatttttccttgcgacggaaaagggacgccacgccaaacaagcaacaaggttccgcaccgtacggccagtctggccttttggatccccggggccaccggacagacttacctgaccccacctgtcattgactacgaaccgcaccgcccccttctgcatactcgaagtcgaaggcagcgcggcaggtagcacggcactagcaggtagcagcggttggccaccagcacccgacgccggaggcccggaggaggaggaggcggcggcgatggcggggaagcacgggcgcaacggctacgacgacgacaacgtcaaccccttcgcggtgagtgctcctcccgtcacccgtcaccgccctgccccttcggcggcctttccactcgccgcctagatctcggggggagttggcgtgcatctccgatccgatcaccacccgctttcgctcgcatttgggatccgtcgcttagttgttgctcatgctccggatctgagcgtcgcaaggggaccagacggccgagatgcggatttgtgcgcttggagtttgctgatcacgtgcgtcgtgaaggttttgttagaacactcgtgggaggggctacttaactctagatctgtgcgtgcccatgtcaggaactagtttggatgtgagatgctcggttctgcattgagctggattagttgttgggacttgattcagtgtcattagattggtaatgcgacgcggtggccttttgctgtgctgcagggcttctcccaacttccccgatccggagccaccttatatggcttgctaggttttggtcatgcatgtttactgatagttgattaacacaacgcaaactgtcaaacttacaagtgtagtcatgcagcaagtcttcaacccacttgaatttagtcggttggtgttttgtttaagtcggttgatttcacaattcacatgcttttggtgttatgtgttgattgctgtattttgtgctgagtaacagtctagttgcagctggttgaaaatatagaataatatgatcactgagttgagtctctatttcatgtgtgactgcttatctcccaaatattccctatcttgcagggaggaagtgttccacctgccaccaattctcgtctctcacctctatcacatgaaccggctgatttctacaatgtggacattcctctcgactcatcaaaggtacttgtaatctctttctatctggatcacttccacaattggaccaaattacagttttgagaactcttttcctattgagtaaaaaataagagttaacagttaaccgacctgtaactgggtacatgcaccctttatgatgagttagctcatttatgttattcattgtactgtaggtatgccaacttgccaagttggttttgattattttatctgatttgtctatatgtggatggttccctatatcttacatctgttgatgttgatatttaggatctgaagaaaaaggagaaagaactccaggctatggaggctgagctaaacaaaagagaacgggtatgctgccttatcattgcagagctttcagtctttctgctccttttgccagttatagcagttctgacaaataagatgcaagttcatgtttcacaaactactatatgatgtgcaatttgtctctcgtacttaatatgttgccaaagcattcgtggtactcaaatatttcatctgagaggcttatgttgcttcacatattacttatattaattttaaaaaatcattccttctgcatacaattgcattgagaaatccatgttgctttatatgtattgtctgttgacctttttattggatattttgatgctttttctgagatattggagcattttgagtcaatgaaggaaatgttgtttttgctgcttccccatgtgttttaaactttgaatccatgttccatctgtttatttactttgtgcacagttctttatctaaaatgttgatatgattcctttttatttgtcttcattggcgtaggaattgaaaaggaaggaagaggcagcatcccgaggtacatttcatctttgttgattcttttaagtagctgtctatttcattttttgtacattcaataaaaaattgaactcataagaaatatattggtaaaagcaatgggtttattgaggaaatgtactgaggaaccaatcctgtcacccaacacgggttacacattcagttttatttctatgcttagttatcgatgctatttgctgagaagattacttctactagatgatgttttcagatatcatgatgtatgtcttccatttttttgaaagaaaaattgttattcttttcatagagagttgggttgctctatattttcagtttctccattaacttttatcatcttttatttttcagctggcattgtgatagaagagaaaaattggcctcccttttttcccctcatccaccacgacatttccaatgagatacctatccatctacaaaggatgcagtaccttgcattctcgtcattcttgggtaagctttaagtgtccaaaatgtgctggtttgtactactgtactagtgtcctctctctctctctctgacttaagtatattctattgatctattttatattatgcattaatagtgttactactagtagggagtggatggcaatacactttcacttccttgctttttcaataaaggatttattatgttcatttgatctgtggactgatgcattttgcagaaactaattctgatagatagtggctagtacgttcatctggcatagcatttctcaactgaggttctcttacccgatgtgttcctcatgcaggattggtagcgtgtctcttttggaatatcatagcaactacaacagcatggattaaaggggaaggtacaactacaatgtgccttattgtcatcttatttatcttcttgcatcagcacatgctaccttactgacacttcaagttcaaactattatgacctatctacttctgtacttaaaaaggtgttatgatctggctgcttgccattatctacttcatatctggtgcacctggggcttatgtgttatggtatcgacctctttataatgcaatgaggttgtttatatgcatccatcccttaatacaatacaatttttcaccatttcaatgttccttataatcatatatcttgttttgtttgaatttctgcttcagaactgagagcgctttgaagtttgggtggttttttctattttacatggtaagatgtcaagtaaaataaactaaaggtttcacacatcatgtcttagcattgtattcataaagttactgcatgcctcactgccaatctttgcccattttccagattcatataatcttctgtgtgtgggcagctgtggctcctccattccctttcaaaggaaaatctttggcgtaagtattgtagttttctgaactttacttgagagttgaggtgcaataactaataactctttgtaagttctctttgaagggtagctgtgaggagccatagatgcccctagtcataatttgtgtttccatacaatcttattacataaaaagtaattgctatttcacttaagaattagtatatttacccacttggtgctcgttctgaattgtagccaataataatctccacaaggaatcattgtggatatacaatatttaccccaaatcttcagcatgagcaacatacacactttgcggtcctggaactatgaataaaacttcaaatcaggtagtgcttgctaaagttgaaatagctattttttttggctatcatgcgccataactttaccgaggagtcctggtccacctgtgttataagaagcctaacacgtaatgttgttttctaaccttatcgtgacaaaacactggttttgagggtttatgtaatcaaaatcatttgtccgttttcaacttaaaggacgctctttattttttatgcatccaagtgctaactatttctttgctgtttttacagtgggattttacctgcaattgatgtcataagcaagaatgctattgtgggggtatgtctatgtcagttttgagttgttaagtttattgtcatggctcactttacctatatgactttgcctcctatttcatgaatcatgggcatatgatttacttaccaaggaaatatatgtttatgtaatattcaccatggcagagagttaacttcattttcgttgcagatatcttgtatcatgtcctcggactcttacatgcactcaattgcctttctagcttctttaattcctaaaaccgcactctttaacaaatgctgcatccaatagtcatatattggttggcatatcttatttagttcctaagtaattatatctttttttaatgtttgacagatattttactttgttggatttggcttgttctgccttgaatcacttctgagcatcggtgtcattcaggttggttgaatctattctttgttcaataaatccttcatcatattgtgcattgttcgttcatttattattatttttttatgttcttcgcacctgatcaatgttctctcaacttgcagcaagtatacatgtatttccgtggaagtggaaaagctgcagagatgaaacgtgaggcagcacgtagtgctctaagttcagccttctgatgaacagagggcggtgtgatcacagccagttgatggatagaaggaaatgagatgtgccaaatgagccacgtggatttggatctctgaaatcgtacagctgatcatctttttgctcttctgtaaaatatgaacaatcctcatatggatgcgtcagggttcacttattgccatggtttaggtgtcgttgatagggaaaacggtgaagttttttgtagtagtgaatataatgtatcttcatcatacgtttgcatgtgagtgtaatagcttggtggtcatttttcttgtggtatgaatgcaggtttgctgtgttttcggccaaggcaaaaacacttgttttatgacacttcctgccaaccatttttggtgcaagaatcgtatattgagattgtcatccgtagtattggggcttttgcaagaaggctctggtcctggaattccaaatttttctattggagcttttccaataaggttctggattttttccataaaaaaaataaaaa

SEQ ID NO: 4958 - DNA, 7290 bp, Sorghum bicolor
agcccagtgaaaacagccaacggctagttttcttgaggggcttataaatagttggtggccggctttgggaggaaaactcttgcacattttgattacttgagacatactttgagctagagaatactccctccactcatctccttgcttgattgctcatcctagtgagattgagtgagattcaagtgcattgctttgagagttgcatttagtggcacttgattcttgagtttgctgcggatttcttgttactcttgggtgtttcccgacgctctagacggcttggagcagcggtggtgttgagctcgtgattggagattgtttcgagcctcaccaagtgatttgtgaggggttcttgagccttccccgcgggagatcgcaattggctactctagtggattgctcgtggcttggaggatccccatcttgtgagtggatgtgcgccacccgctgagggtttggctttggattgccaattagctcgtgatccatcaagtgggtgtatcgccacaacgaggactagcttgccgggaagcaagtgaacctcggtaaaaaatcttgtgtcatttcttgccgaggattttctcattgttgtgattgattgattggctatatttctactctacaacgtcggtataacaatcactcacctctcctttacttttgtgcataccttgctagttgtgtagcttgtttagcttagttctcttgttgttgtgctttagtgtttagccttgtactagtttgtataggtggcttgcatagcttagttgagctagtgctagaattgcttcgccatttgttttactaactcacttgcttagtgaagtttgtagaaattttaaataggctattcacccccctctagccatttggacctttcaactatacattaattattttttatctatatttaatactctatatatatatatatatcataagatttgacgtaactgaaaaattttaaaaaatatatagatttcgggggtgagctaaacaaagtcttactaaaattgggcctgcacgcactcaaaccagcgatacccgggccttgtttagttccaaaattttttgcaaaatcgacactttagcactttcgtttgtatttgacaaaaattatccaatcatagactaattaggctcaaaagattcgtctcgtcaatttcgaccaaactgtgcaattaatttttattttcatctatatttaatactccatgcatgcgtctaaagatttgatgtgacggaaaatctgaaaaattttgtaaaattttttgcaactaaacaaggccccaaccaaccaaccaacacaaatgaggcgtcgaggctgctcggcatatcaacaccattcaaactcgtacgcggataagcccaacatttccggcgcggtggccgcccaacattccggcgcggtggcgagcagttgatatcgtgaccaccccgatccaaagacaagcgtggatggatggatggcatggtccggcggggcgggaccgccaccggcccaccgcttgaattgaaagcgtcgagctgctgactcgagcacgagcagatgcagatagcagccagcacgccgttgacccttggcgctttgcgagctgctgcctcctgctgctaccgccaggcgccagtccgtccgtccgccacccaccaccgcgcgtgagcggactcgaggcagcgagggcgagtccacgaccgcgagcgaaccgagttgtccgctcccggcgcctgatcctccccctcccacctcctcctccacctcgagtcgcgcagcgctcctcgcctacttttccgcgacagcccccccgcgcgccgtgcagtccacagccgtcgccctggattccgtgcggcgcggtactggcccacgccactgtcgccctaccaatctcgcggaacgattggcggcccgggagaccgcggccgaaccccatttcgcctgacaccggcgggggcatgatcctgggcggcctgctgcgcaccgcgtcgtcacctcgcctggcgtcgcgctcgaccgccgcggcctcctgagccctgaacgccgcccgcctgcccgcctgtcgggtgggagaggataggagggggtggcggcggcatgagggacgaggcgatgggctctgcggcggagctgctggcgccgcggatgctggtgtccccctccagccgcgtccaggagctcgagaggttctcgcattacgtcggtacgctcccccccccaaatctgttcctgcttcctttctactatgatggactgatggtagcatcgagttctgtggattggctgtgctatttgaatttcaagtggttaagttttgatttgagttccgtcctttatatcgtttgcttttcagtttcggttcatgcgccgatgcacgctgctcggatgtgaattccatccatggtatatcgttgctactagtgattagtgaacagtgatggaagcatgttgactaatttggtaactccttggggttcgcacgtctgtttgatttatttacttggcccaacccaaggtatatggatacggctctgaataccaatgcagaagcatcttaactagtgtaaattattagcttccgtggagagatttgcgtagaaccaacttgcttatacatggttctgtcgcttgcatgtcacactcaagatctagattccacatgcgacatattctttgcgattgactggctgtggttggagttggagctttcgcaccttatgctatatatatgctgtttttgtggtcttgggacctgcactgtctgcttacccttttgacctgtctgcatcgatgagaaaatgctgattctcttttcgttttcagctaggcaaattggctttgacgatgtgaaggaatgcccccacctgtgcacgctagcttacgattatctcaggaagaacaagggctatgaagagaatatttttgcattcttccagaataacgtggatcctgaacccctgattgtgaagtttatcgaggagcttgacaaatgtatagttggctacttctccttccattggaaatatgccacttacataattacccaggtaagcggggttcagtgggttttgaaatttacctcatgttggctcctagtcctagttaaactctccttacactatattttgtatcttgatatagtagtgatatcgacaggttctcacggtagaaggtgcgactaaaagaaagttcaagaattttgtgctagaggccaccaggtgattacccatccttatgcatagtacctgtctgccaagtggctgatgttgtgctacttatgctcattccctctattcacattagatttccaaatttcccttcattactttcagtatgagtgctttctacttcaaccttaggtagtagttaaaccatgtgatctcttggctggagtatcattaatgaaaaatatattgattactttatgtcttgagaatctctcgtttgttgttaaatttggatcacattccttgatgtactagttgcttgaatcttaattatttgctcggtttgacatgtttattatccttcgttcacttgaaattcccaaatgccccttgaatacttttataagtggtttgtactttacatattagttaaaccatgtgatctcttgattggagtgtcattaatgaaattatattgtttaccatatgtgttgagaatctctgtttattgttaatgctggatcatgttccttgatgtactccttgcttggatcttaactattcattctgctgacttgtatactatctctcatctgaccaaatagtaaaatactatgctaacatggcgctagacatcttcagattgcaaaatgggcatttcagcaggaactacatcttctgaagtcatatgtaattagatgataagcattgctatagccaagtcaggtcacttcaattactcgtagagccatacatttactcttccatgttctatgtatgcctctgatagaaaaaatgttatattatgactcagataagttgctgttttttagcatagttgctggttaattaggtgattcctgttactaaacataaaagcaatacaacgcagttgaagaggcacattgattttaatgagaatgtagttgttttcctcaaactgaagcatgctaatttatataagattgaaattgagttcgggcattaggtctcccaccaaaaaatgtaagagtctagtaaaagtaataaggctacaggacatgtgtgctcattgtgttcattttctgtagtgtctaggttctgtggtagcggaattcaggaaagaagggattctaatcgtataaatacatataatttagtttgtcgatggtttttattagaaaaggcgtgcataataatctaatccagcgcattcctgtttggatgacacaagcaaacgactgttgctcctccacacaaaaatgattgtccgattatccactgaaaatagggaacagagattcgagagagtgacaagaaacttgaaggttacaaggtttttctccacattggtggaggaactgaaggccataggactatctagccgtgatgattctccacggaatgatgtgatggttccagtagcacactgcaatcgcagcccggttttacttctgatgggtggtgggatgggagctggcaagagcactgtacttaaagatatccttaaggagtaagtatattaagtagattatttctactattcaaattctgttcattttccatttaaattgtgttgatcatcttacatttctagtttcatggagaatggaaaatatgttgatttggtttttgaatcttcacatttcgtcacattggaatgtaggaaaatgaatgttgttagaatgaattgagaaggaaaaaacaatcctgaagacagagcacaccttatacagtactatcagtatctggatataggtacatgttgatcatcttggtatgcatttcttaattcacagagcattttggtctggagcagcagcgaattcagtgattgtggaggcagatgcattcaaggaaaccgatgtaatctaccgagccattagctctagaggccaccacaatgacatgctgcagacagcagagctggtaatattttttaccatatttgttatcagaaagacaatagtattagtatcaccagtaatgcaatatggcccactagctaactagtcaaaaactcgaaatgcataatactgcaacattcaatattgcatggcttagactttcaaagaaaccccaagcttgtgtgcgcattgcaggcatactagaaatcagaaacaagtaaccagtccaaaacacaactaatttccacattaatatatatttatacatcatgatctcgcacctccacatattgcagatgtttacagcctttaaaattatacctcaatgatccacaatcacgatgcaggtgcaccagtcatccttggatgcagcctcctcgctcctcgtcactgcactcaacgaaggccgggatgtgatcatggatggcactctgtcctgggaaccgttcgtgcagcaaacgatagccatggccagggctgtgcacaggcagcgttaccgcatgggacgtggctacaaggtaacagatgatgggacaataactgaggagtactgggagccggttgaggactctaatactgatgaggagaacgaagtaccagcaaggaagccttaccggatcgagctcgttggtgtggtctgtgatgcatatctagcagttgtcaggggaatcaggtgcagctcatagcttaatccatgccaaaatcagccactgccactaacattctacccattcagacattgtcatgcattaagctctgattttctcgcattgaaacggtcatatgttgggaaatggtgcctaatacatgcaacgtgcactactaaaagtttacaatttgcaggagagctgtagtcactgggagagcagtgagggtgaagtcgcagctgcagtctcacaagcgatttgctacagctttcaacagttactgcagccttgtcgacaacgcaaggctctacagtaccaacaccttgggtgttcctaaggtgagccagctaacctggtgaactaacatgacaaaactgaaccatttcaggacacatgaatttcagggggaaaaatcaggcattttgcatggaatagttaaattcctgcagcatgttcttgtgttccaacttccaagcatgctcgccaacttccactattattattactgtcaagttggttgagagccgatcccgtgttgcagttaataggatggaaggatggcgagagcagcttactggtggatcccgcagaaatcggctgcttggacagactaagaagtttgaacgaggaggccaactgcgtccatgagctatacgccgacggccaaccgacaggaggctcgtcgtcagcatggcaggacctggtcatgtcgccattgagggcatcggcgcagggggagctcaaggctgccatcgaaaggaacgaggcacgcttcaatcctgcattgccgtagctgctgtcttactggtgcatcatcccaaaagtggggaaaagatgaatttcatgtaatgcaacattcaattttttgtttcttttcaaacataggaatttctcattaggtcttgtttggatgatatcgaattcacctcaattcacatgtgttggggtggaatttaattctagttctactccattccacctaacacatgtaaattgatacaaattcgattacattcaaacaaggccttaggattccaatgagtatgctatctaaaatgattcctatgtgtttgcaccgcaaatttaatgcttgtacagttacagaaaagtttgctagcgtaaagtatccgtgctagcatctgtttgagtgactggccttgtcgtaaaagaacaaagggttgtgttatatatcagttcagctgatgcatggtcagatgacgacggtctggaattccgatatatttctaataaaacaaatagctgcatgttgcatgttggacgtaaaagttgcatccacactaaaaataattttcatataaaagttgtagctatatgagattacagatctttaatgaagtatcttcacataccttattacttttatactgaagaccgtatgaaaaaattattattgttcaaaggtttgttcgcccattttgttgcgcgatataatttgtccaacgctaagcggtgggaaaattgattttccacgtgtcgtggaccattgcaattttcaagggtgcctgaatttcatagcataattacaaatacaatttataattttttttctatattcaaacaatcacaaaagaaaaaaa

SEQ ID NO: 4959 - DNA, 7276 bp, Sorghum bicolor
ctaagaacctcgctgatcgcactcgtgcagccttgtcagtggagacggccacacccgccccagactttgcaggccacgatcgcaagggcccttgccgtccgcacctgcccgcttgagttcgtcggactgagcaccatggaggcttgtcatggagacggcagcacccgcccaggacctcgtcggtcgcgtccacctgtttgagtttaccagatcaagtgtcattgggatcacaggccatgagaactctgcttcgtgctcgccgccatccatgtcgattctggtcgctagagggcagttgaagcggcgcgaggtggaagaggcgagctgacgcgagtggggaggaccgccgaagacggtgcggggaggatcgcctgacttgggaggagcagaggtgagcgaaggagcaccggagggaggcaagagcaagaccggaggtgaagcgaacgctaatctgcgcctggctaagcctggctctagaaaaacgaccgacaccctggttctttcttggccaggctaagggtgtacggttggctcctcggagccaggccccatcccatttacaggtaactaaacaagtccatcttggctacagaaaaccaggtcaggagttggccacccaaccaaacacaccctagagcgccgcctcacctggccgagcttggagtgccaccccgcctctgtacccgtcccacgtgggttgcccctgttccctcaatgactccaaatcaaaccgactaaaaataggtggaaaaagtttaatttttttccctcaacttttatgaaagtctgtcttttatttaaagctttaaaatcagacaaaccatatctctcaacttttaaaaccgtgcgttctatctctctaccccgattataagcgggtttaaagatagttttgttttatttatttatttatttatttattttgactaaatcttttataaagtcatagtaaatcatagaaaaatcataaaataaaagatccatgtgagtagatttacataatgaacatataatataatatgttttagtataattattttgttgtagattttgatctgttctttttctataattattttgaatattttataactgcagtttctatagtccaactgtggtaaaatatttttgttggctaaattattatatgattgagatgtaattaaaattttatacttaatggatcatttataacttagttatataattatttagggtttatattggttaaatctaaataaatttataactaagttagacattatccaataattatgaaattcttaccacaatagaagcatacaataattaagccatcataaaaaatttaccacaattaaatcgtagaaactgtagttatgaattattcgaattaattacagaaaagaataaatcaaaatctacagtaaaaacttatactaaagcatacttcactgtgtatactcatgtggagtttaacaaaattagattttctattttttgattttttgtgatttgctataatttttcaaagactctaatgaaataaataaaaagaaaaaaaagacaaaatgacctttaattgcttataaccggccaagaaggtaaaatgtatggtttcaaaaattgagagaggtgtttacccaattttaaagtttatagagaaaaaacagattttgacaaaaattgagagaggaaaaatggactatttgcaaaataggtcaatgccatccctgtctcacctgatccctacatccaacgctacgtttagtggacgcggcccgcggcccacagacgcgcccgcgattccgccaacccgccaacttgcgaaagaaagaaggagcaccaaaatttgaacgaaaactttggagggaaagctcccgccaagataaataccattccccccaaatcctcttctttcgtcctctagaatctagacccgagatcagatcagaaatcttcgaagccgcaaaggaagacaagagtcgtcgagagatccggagcgaggtggagagatcgagatggcggacgtggggagcctcgagaggatgggccgggagctcaagtgccccatctggtaacgccgccgcgctgctctgcccgcttcccccttttctttctttcttggattggattcctcttcttttgttcgtgtatctaacagttcgtgatattttgatgagacttgcgatttgctgctgtattagcttaaatatttcttggtttcggcagtttgagcctgttcacttcggcggtgtccatcacctgcaatcacatcttctgcaagtgagtcccatccctcgttcctccccggtggatctagttgcggccgataagcttattcaatttggtctcatatgtctcttgttgcagcgcctgcctgacggagtcgatgaaatctgcctcctgctgccccgtatgcaaggtcccgttccaccggagaggttagttcgttagtagtcattttttggcatatctgaatttgcacacctttaatttttttagagattaacatgcttaaattaactgaagaaattccaaatccccacaatgaaatctgcaccataatgacctgtcagtctccatttggtgtatgtcatttccgataaaatccagcattatctaattttgatggaagttgaaatgcttgtgtaaaaaccactaaatatcatggtgttttactggcagaaatacggccagcccctcacatggacaatttggtgtctgttttcaaaagcatggaagctgcagcaggcactagtattgtgtcaacacagctgactcctgcacccaaagttgcaggtaactagaaatatttagtttctctttctgtttcgtggcacatgagcaagatttagttacactggctgttctgcatctttgtctttgtaccacatatgttgagtctatttgagcatagttactgtttaagttcttttccaatcgaatttcagagaaaatgaatgatagtattagacttactgtcttacttttacttgaaatggatcagagtgtggtgggaacagtgctgggaagcctaaaaggtcaaataaaaagaagccagcatccaggaataaaaagaatacacccaaagctactaaaacttctgcatcttgctctactgcaaaaccttcaatctccaagaacaaaagaatacacgttacaccattccctgaatctgagacaccaataaggcccaagaaggttatgaagtctgatgagcaaaaaagtaagcagaatggtgatgttaatgaagaggataaagataaaaccctgaattctgatataccagaaagcccttcattgtcaccttttttctggctgagggaagaagaggaaaatgaaggtggcactgctgaaactttgagtgaaccaccatcattggacacacccttgcgtcacaatgcgcctacctttagtgatatcaaagattctgatgacgaaaggtctaatgatatgactcctaatgtaagttactcagaacatgttttccttttattcccccgtttttttttttggtttcctggttcaactgttgtgcttaccatttggttacatgtgttgcagagcaaagctgaggtttcagaaatattcgacagtgaaatctttgaatggagccaaagaccttgctcccctgagctgcgttctaccccactgaaaagtcaggtattttggttaactgagacagaggctttatatttacagttctgcaatctttacaatctgaatatatacatgtatttgactcagctgttttgtttgttcagggtaaattgaagaatattctagatcaaatcacagaggtggatgatgatgaagatatgaatcttggtggttcatttgataagttagaccttgaaagtaatgtagctcagcctctcaatgccgaggaagttaagaagaaaaagttagcaagacctaggaaaagaaagaattcaaaactgcccagttgtggcaaactatgtacaagaggatctgatgctgagcaccaagttgcaaatatcccagaaagtattgttgcaaagccatggcaaaaggacaatagtaaaaaagagagaaatacttcaaatggaggaaacatggtctctggcagcaacactagagctgtcttctctagtgataaatctatgaatacattttcccctcaagcaggtggtttgggcaatgaagtacctgagaaccagctttcagaaaggatccccaaaaagggtacaaacagtcgaagaaaacttgaaatagcaggggatagtgcagtgaagactgcagagaataaatctgaacaaagagggaagcggataagaagaatctctgatggtgctgtagctgaaaagataagaattctttcagaggctgaaaatgaaatagaattgtttcagcttcacagcctcacaaaaggctgcacccaacataaacccttggacggtagaagtaaaaaaaacattgtatcaaacattagtccaaatacaccaagcattttacctgggagggaccaatttaacattggtccaaatacaccaagcattttacctgggaggtgcccattaaatgaggccatacgcacagttccttcagtaaggaatgtctctgttaagaatggtagtgcgaaatctattgaacaacaagattactcaggaactatcagatcatgcactgcacgcaatgctgtcctgaagaaatgtgagggtaaagcttctaagctttcctgtgctttctgccagtctgatgagatcacagaggtatgcgcaattgcacacacacagacaagttggtttgcaaaaagtctttgccttaaagttacacatccttcctttaactaatggaataaaataaccaaattttcctttttgttctgaagggatctggagagatggttcactaccataatggaaagcaagtacctgcagcatttgatggaggggccagtgtagtacattgccacaaaaactgtctggagtggtatgctgcacctttctaatagaattttatattggaagaaactttaattttcagtatccctagctaattcatgcatatgatttttcttccaccacagggctcctgatgtctactttgaagatgactctgtctttaaccttacaaatgagcttgctagaagtaaaagaatcaaatgtgcttgctgtggaattaaaggtgctgcgcttggatgctttgagacgagttgtcgaaaaagcttccatttcacctgtgctaaattaatcccagaatgtagatgggataatgtaagttcatatcatgttgcactagtgttttcaactagcttcttgatgttttgcgtccagcactgtcaccttatttctgacttttctcttttcttttgctgacaggaaaactttgtgatgctatgccctttgcaccaatcttcaaagttgccaagagaaacttctgggttgaaaaagaagtcgcataggaaactagcaccaaaagggtatttttctagtgtttacggcatgttagtttaaaaatctaaggttgatgaagatatggatatttactgtaacataaccgttttacaggccatctcaagtaaacactagtcaatgtcatggtaataaatggacatggccatctggatcaccagagaaatgggttctctgctgttcagccctttctgctgcagaaaaggtgttttctagttccttagtttcctgatagtctttattatacttgtttcatgtgcatttcgactgaaataaaatggacaaatccttcagggtattgtatcagaatttggaaaactagctggtgtgcctatctcaacaagttggagtcctaatgttacccatgttattgcatcaaccgacatgtctggtgcttgcaagcgcacactgaagtttctgatggcaatcctgaatggcaaatgggttatctccattgactgtaagtctattttattacctgctggaatgatcactaattcattacatctgtgcagaacagtttgcacttgacaaattgctgctttgttgctaaacactgactttatttcacaggggttaaaacatgcatggaacttatggaaccagttgatgaactgaaatttgaagtttccactgatgtacatgggactgctgagggtcccagattaggtagacaaagagttatcaacaaggtaagagtatttgccattgttatgtactccatctagtcgtctcattttctacattgtcactgtctacaatattagtataatgctatgttaaggacattgttagcatgagcatgaatatttgcagggatagtttatagtaataacattttttccttattctgcagcaacctaaattattcgacggctttcagttctatctccatggagattactccaagtcctacaggggctacctgcaagaccttgtggttgcagccggtggaactgtcctgcagaggaagcctgtgtcaagaaatcagcagaagttgcttgacgacagctccttcatcctcatcgtctacagcattgagaaccaagacaaggcaaaaccaggatcaagggctggcatcaatactaatcatagtcaagttgatgctcaagctctggcctgtgcctctggtggcaaagttgtgagcagcgcatggattattgactccatagcagcttgcaaggttcaaccctttaagggagccttccatgctgccctacatgtgtgcttgcatgcacggtagattgagtaatggatagaaaatagtctatgtattagaaagatattttatcttgatgaaaacgccagatttcatcaataccatagttaaccatctgttttaatttaaaaaagcagtgccacactgtctcacttcgtatcaggttgttatacatgttgaccgcaactgaattcaaaagacatgcttctgcagctaattatatacgggaatttgtatggagctcatgcaacacatctacgaagcagcaagccccctgtcactagatgaaaattgtaattccaaccaagtggagaattatacaagtcatgaataagtgcaacacatgagtggtactaaaattatgataagttacactgcagctgccaatcaaagcttgtgaatgtcatgcagctagctggctagtaatatacccccatgtagcagacttggccaaagtacagccgatgtcaagctgaaatttgcatccttaggccttgtttagttcgcgaaaaattttggatttcgctactgtagcactttcggctttatttgataattattatttattatagactaactaggcttaaaagattcgtctcgcaaattacagataaactgtgcaattagttatctttttttt

SEQ ID NO: 4960 - DNA, 7787 bp, Sorghum bicolor
tctctcatcgtaacgaacttgtggaaatattattatttttttgggagcaccggagcctctactttgactagctgcttgtttttttttaaaaaaaactcaacatcatattgtgtaatgggaggcccgatacttaactttctcgctcgtaattcagcctgggtttatcaacaccgtgaggagtcgcttcactatttttaaaattttaagtactgtaggactttctttgtatttgataattattatccaaccatgaactaactagctcaaaagattcatcttgcagattatagacaaactgtgtaattagttattatttttattgatatttaatgcttcatgtatgtgccgtaagattcaatgtgatagaggtttttgaaaaaaaatagtactttttgaactaaacaagaccatattctaatacatatctcgtgagtcgtgatagtagaattcacaatcgcatttttatggaggaggaacgaccaatgatgcaaaagactgtgtaatctcgtcaaccacatgaaaaaaatactgaccgtaaatgctttagctcacaatcaattcttcggaaaagctatttcttagatacgactaaacaagttacaagatctacttggatcgtgagttctatgaacattttcaagagatcttcatattttattcttaaaatgtggtgtttgacaacttttaaattagtatgagaaaaaaaaagaaaatatttggtcttatattttgtacctgtaaccatgatttcatttctatattaaatccttccactaaatttttctctcttatgtttttctcacttggaaccctggctgtctttcttcttgattactacacgggccgagaaactcaggatacgccttcctagaccgagcgcatatatacgcactcgagataattttttgcgagttggaaaaagatgggaagggaaaatgccagactattggagagaattttttcttattttacaaaaaaataaggatgaaaaagctagatgacaaactgtcgaagatggtctaatgccatgtttggttggcgttagttaagtttaactgccatcacatcaaatgttttgatacatgcatgaaatattaaatatagaccatctacgaaactaaaaacacagttagagagtaatttacgagacaaatcttttaagactaattagtctatgactggacactaattatcaaacaagacaaaaatactatagcacccgttacactttaacaaacccaaccaaacaccccctaatattaccatcttaattagcataaacacatttctctatttctcacataaagacttgtcatgattagatcacctagaactagaatttagttagctccattgttgttttgatatatgtatacacaaactgaaagcaaaaagcttttaaggacaaaaaatgacgtgcgaggaatattacattggtatccaaagatgccctaaaacagtcgtgcaaatggtttgttttattgttaacagaagaaaggtgtatgattagcgtgactaatgatcatcgaagacagagaaagcaaaccaacaaaacggcccgtttgagaaagaaagtcagaaaaaaacaggcacgcgagagtctataaagaaatgtaggtagactaacacgcaagccaagatcaagtcttctccggattagcgctaatcaacatctaccactccacataatcctagcgtttcgcgagattaattcagcttccctcctaccatatcattttcagatgttctataaaagggacggattttcagttaaccttttttatttcctgccgtagtttgggtcttttttccgattttctatattcctcgtgggtttatttggtttaaagtccaaaagagaagagaagggaagcaagcaagactgagcggaggcgagctgtgcgccttgctcctctcccccctgctctcgtcagatccaaaccccacgcgggaacccaaaccctagcgcccattcgcgccgcagcaagggcgacgagacgatgaggggcgttagggcggatggtggcggtggcggcgccggaggcggaggtccgtcctcgtcttccaccgcaggtgatcctttcttgcggctattttcggtgtgattttgttgggattttgtcgagtgccgttctgattgttgcgtcctcgggactttagcggtgtccctgctgcgtcgtttctggtgcgcttgccgcctgacgatttttcgggttgttggactggattagctaaattcgccacttctttttccttatcctgcagacaactcgcgcttcgacgcggcgcagtactccttcttcggcaaggcgcccatgcagggggcggagctcggtggccttttggatggaggtgtagacggcgatggtggtggattcggtggacctgatgatggtggctaccagttctcttctacaggcgaggaggtgcgctcttttgtcttgcaaagttggctttgccactttttaatgttttttgtgcacgggatgcttcagataggttttgttttgttttgttggtgcttgttactattggaatgaatagtgagagctgagagtgacctgagcgatattttctgcggtaggactggtagcatgtgattttgatgcgtggtagtggatacttctgcaccaaatagaccaaattgtgtagtctaacttttaggtttcaggctcaatatttggtggaattgagattcatacctctagtgtacaaaggcaaaggcatgccatgtacatttaaaattaatcctattcttatgggtaattgtaaatatagaatcatgtgtgacaaatggtcaatggataagaaatgtagaaccttttttttttctgctactcactactccttccattccaaattgtaggacgtttttgacttttctagatacatagcttgtgctatgcacttagatatacacaatgtctagatacatagtaaaagcaatgcgtctagaaaagccaaaacttcttacagtttggaacggagggagtagttattaggttgtgtttgaacattattgaaactacctaaataaataacatcaggtatgatgctttatgtctggctgaggtagtttgaagaaagcagaaaaatatatatttttaatgatattgtttctgaattagccttccgccttcctaactattttagcagagcctccattgtgtttgattactccataaaattgtttttgtccttttaagctatttccattgtagcattcaggtaggacacatcagtgttcaatgaattttccatcttgaaaggagtatatgctttagctgctgccatgctgttgctgtagtgtttaaaacacagttacattcagcgctagaccttatatagatgctgttactcaacctttctacttatttccattgtatttcagttattgattgttgtagttaccttttctctatcatgcaaatctttctttctttcaataaatatgtttagttatgggtgctgctaggggctagggcttgagattggagtacacttgggaatagtacccaatcaaacattatgtaatcagttactgtttttggtatataagtggcacttggaggtgttgacaggtatagttattgtaggaactgcgcatgagcaaaacagctcattttcttgaatttcatcagtgagtatggtttgtacctgttgtattgtctagatctggataacattccttttggtatacctttgaagtttgaacacagttagattgctttgattggattatagacttacagtatacaatggtatgtaagattagctacttaacttttaacattagattcttgatgacgagctaaggtcgtgcgaccaatttgtttcataggtaatcgtaagaattaactattgaccaaatcgaacccttaactatttgaggcatttgctctttctttccctcagttccttttcctgtttgctcctattctttctatatttcatcatgatcatttgtttgccttctgtcttcctgcagattgattgtatcagtaacttgtcggaaattgatgatcttgcaagcacttttgcaatggttagtgcctttattccactagcttgatcagtgatcgcttcaatttgtgtcttctgcttacctaagtattgaggatatatttgtttcatatatattttactgtatccctggtagtaaatgtctgtttggccagcaggtgtttgaaggtttcttaagctatgccatttactcactatagtgcttttctttaatatagaagtcaaaatgttaaaaataagaaaaagaagtctgtgtatagcacctttcacaagccatttcatttttggccttgcacacaaaagagattaggtgacaaagtattgtcaattagtcgagttcatctagtcataggctcggattatattatggaacttgaaattacattgccctctaccttaagttttttttttaatttcattatgtggtcactggtcagtagctacacgatgcttcaaattattcattattatactcttttataatattgtaattcttttttccgacttcctgcacttcatatacacagttgaaccgaagtattagcgggacaaggaatcctggagttattggtgacagacgatcaatttcgagggaaagtaagtaacagttctgccctccattaccactaaagcttaacattgcacaagttacgtcataagtcgaggacaagattattacttttaatctttacctttgcacggcaaatgatttagtgatttactcaccttgctttagctactgatctttgatatggcatggtttcattttgtatctggtttccttataggttacatcttgaacgctgtatattcttattagtctaaaatagctcttgacaatgtaaatatgttacacttgctatggcactctgaagataagatattttgctgatgggcaatccaaagtcatgcttattttgtcagaacgtacaccacatatttgtatataatatttacaagaaaaggcacataatctctagtttgctgttggtaaaaaagaaaaagaaaaagaaaaagaaaaactgcattcatgtcccaatgtctaggttcttgggctgaccatcagcctgttgcaagtgtgctttctgaatcactattattgatgcaatagtaatatgttgccttgtttagaaatataactgtgatgccaccttttacatttttatattcttattaagtgccaatattcactgtgccatataatgtcgtacttcaggttctttgactgctgattgggctcaagatgctgacttctccaattgggtagatcaggatatactagatggtgatgaatccctggacagcaaacaatggtgctcgcagctgcaatcttcatctcactttggagagtctaaaccactgtctcgtacatcttcatatcccaatcaaccactacagcaccgctcaagtgaacctattcttttgcacagatctacttcatttacatcctatccaccaccaggtggaagtcctgcattgccttatcctgctcaaggtcttacacggcactcaagcattccatcacctggtgctggtcaccacatgggttctccgagttcatcgctttctggttccccatatcatatgcctggtctatctcatggactgccttatggacgaagcatgtcttacaccactggagatctgtcaatgaacaatgtcctacaaaatgagtggtcaaaccaagctggcccacttgcctttgatcatcttaaccggcggcacagtttattgcagccacagttatctgttccaagtagctcaatgtcttcattgcttttttctcagcagcaccagagattaccaccaggccagccgcctcttcagaattacataaacatgcagcctcacctattctatcatcaccaatctcctgatgttccttcaccaagagacaagcgatcaaggtcaggaagaggaaagcacaacatacgcttttctcaacagccttctgatgcaggtagccagaatagtgagagttcagggataaagttcagatccaagtacatgtcatctgaagagattgaaagtatcttaaaaatgcagcactctggaaatcacagcaatgatccttacatcgatgactattaccaccaagcttgcaaagccaaaagatctgtaacttctcagaagtccaatttctgccctatgtcaataaaggacttcccctcaaaatcccggtctggtgttgatcagcattcatatctacaggttgacgctaatggaggagtttcattctctgccatacgtagacctcgccctcttcttgaagctgatttgcctggatctggtgatggtttttatgatcataagtcatccacaaggccgctggagaaagaaccaatgcttgcagccagaataaccgttgaagattctcttcgtcttcttctggatgttgatgatattgatcggtttttacagtctagccagccacaggatagcagtttccaactgaagcgaaggcgacaggtcctgcttgaaggcttagctacatcacttcagcttgttgacccttttggccccaacaaacctggccattcaggtggattggcccctaaggatgacctaatttttcttcgtattgtttctctgcccaaaggacggaagcttttggcgcgctatcttagacttcttgtctctggaagtgagctgacccggatagtttgcatggctgttttccgacatcttaggagcttgtttgggggcttgccgtcagactctagtgctgcagaaacaaccattggtcttgccaagactgtttcctcttgtgtgcaccatatggaactcagtgctctgagtgcctgccttgcagctgttgtctgttcatcgcagcaaccacctctccgaccacttggtagtgctgctggtgatggggcctctgtggtaatcaaatctgtgctggatagagcgactgtgctactggctgatcctcattccgcagccaactacagcagatcagcacgttcactttggcaagcatcatttgatgccttctttggactcctgacgaagtactgtgacagcaagtatgaaagtattgtgcagaggtttgccatgcagggatccaactccatgggaggacctgaaaccaccaaagcagtcagcagggaaatgcctgttgagctgttacgtgcaagtcttcctcatactaatgaacagcatcgtcagacactgctagattttgctcggaaatctacacatgtatctggtttcagtcctaatgctagccgtggactcatcaattctgaatcagttccaggttaacaccactgaagaaacctggtgatcgtttgttttgatttatatggcactttgtcttcagatggcaattcttatatctggagacatgcctgtgatctcatcataaggtgcgagcttggagaagttccattggctcagtgaagttagcattcaggatttgactgtaggatcgagatgttatatttatagactgaaaaccaacttcatgtaggtctgtcttattatatatcgccctcatgacggttataattgactatgcatgtatgtatcctgctgtaactgtgtagtggactagtggtgaacagaacatctattggagataagctattgacttattttctcccaaagagaacattagtgggtggatggatagcaacagcttagggggtgtttggtttgaggaaccacttcattctagatgaagtagtgcatcattagtctgctcttcaaattttgtatacccattcctcctactaattattagtttgtgaggaataaggtgg

SEQ ID NO: 4961 - DNA, 6489 bp, Sorghum bicolor
tcatcatgcattcaacgattgtatgtataatgcaataagcaaataaatacgcttggtttcagatatatttactctttaacatgcatgcgtcgtgcgtcgactggaatggccggtattatgtgttaagaaatgcagcaacaaatctgccgttgaatgctgctgccgtacgtggcggatgacttgcgaacgagttcgaaatctgagtgaacatggggggcgcaacgacgacgaacaagccaatcgccaaagcaagtcacccaccaaacctcactaatcgatcacactgctactgagctaattgcacgttcgtggacagactccgcgcgcggatcatgctcgcaagataggttaggttagctgcgcgtcaatgccatcagatttactatattaatgagaacagtatttttctgaatcttaaaacagtaaacagtatgacaactgccatttaattattttttggttacgcatgtttttgtatataatatagagaaagatttaatacaatacgctttaccagctccctaggtactgtgtcaacggagatttacatggatgtttggatcctctgttttttaggcaaagccggagcattcattaaatatgggtaaaattacgaccatgagactaggtattttgccactcgaccacctaattatcacgggataccaagcgagcacaagtacgagctagcttattacagtttctactaataaaacgaaaatcaaaactatcaaagctccagctaagttcctccatctgtccaagaagggaagaaatctcagatttttgctgtgatcggttcacccataggctaaccaggacctgacagtccgtttctagaagtagcatgttgacgccttgatcctttgctagttgcattccatcgcaacattccaatgcttctgctgcaagaggggtcagacaaaactcaaaccatttgtttgtgccctcgcacgttctaccatcttgatcccgaagcaccgtaccaatcgtcgcagaccgattcccttcatagaaagctacatcaacattacattttgtctagcctgacggaggccacttggatcctccctaatgtactattgtttaactattattcagattaaatagggtgagcagtcaattaaacagaaccgagtttctgattaaatgaaaatgacattactactagtgtgtagcgtttaaatagactgactacacgactaaggtggtcttgggagtttcatgcgctgcactaagcatttgtagttgaaggtcgaagccctatggaagagaggcttggaaggctcacttctggcatctgccagtgcttccacggttcaccgccgatgtcagtagacgcgaatcgaattgaatcaagccgagggggagagcaatcacctatagagccagtctcaatgcatgtttcacgagagtgtcatgcatattaaatagggtgccacaaaagcaaaattgctgacttggcaaagtcattaaaaaaaggagtttcatcagatgagagaggagtttcatcctcataaaattcctatggctcggttacctagtttatagtcttggtaactgtgtaatgaaactatacattgagactggcctaagaaagaacccggtgcaccacatgcgagccggtggaaccacgtgagaggcattgaaagtggcggcgcgagcgagcgtacgtggtgggtggaggcggattcgatggagcctgtggaaaattcagctcaagaaaactataaaatttcagataaaaaagcaacatgcttgttaagaacaaaagttgtagaagtacaaaataaaaaatcaagaaatgccactgtttgaaccaattatatcttcagcttcacctactcttccatcccagccacactgccctaaggccgcctggcctgggctgagacgctgggtggctgttgggctgcgtctggtttcaggagaggcgccaggcccatgatgccccaatccccgatctccacccgaacagaagcagcgccgccgccgtcttcaacctcagctcctcggctgctcggcctcgctcgtcgcgtcctctcgagacgccagctccggagtggggaacgggtgctcggccacagggacctagggcggccgccctagtggtggctccgcctcgaacttctggcctggtcggtcggcccggcccctggtgatgagccaccggagacgatctcgcgctgccggctcgccgcctggcgacgccggtccggcccctacgccggagaagtcggggcggattcagccgagggcggtgttggggtcggaccggagggtgctggcgctcgcgctggcgttccgcgcagccaacgcgctgctcgtgcgcacctacttcaaccccgacgagcactggcagtgcctcgaggtcgcccaccgcgtcgccttcgggtaacctcgccctcgccctcgccctcgccttgccgccgctgcttgtttcgctagttttagttacagtgtgccccgagctggatcggcttgctgctcaccactgcttagctcgagggaatgagatggtttccctgcgaaatcagggtagcattgtttttcatgggaatttgatgcccaattgctaaaacttttgttcttttgtggttgggtgcaggtatggtcaccttacatgggagtggaagcgggggctgcgaagttacctccacccgttgatctttgctgcgctctacaagatcctggcgctactccacctagacactccatgggttatggtaacatgtcagctctagcagagcatcaattcaattgctgggaggatggtgaatagtcacaagcctctggggctagaattgtcagggaccatgatttctattttctaggggtaggttattatatgacagtactaccaggaacaaaacttctctaatcaagtaatcagtaccttgggctgtccctttttgaaagaaatattcaagatcaagaattattctgaaaaatgacttggaactcagtttgagtcattgtgttggccttgtgataccagcctcttatcataataaacatatgaaaacgtagtttaatcttaattataaagtataaactaccaaattgctagcttaatttgagcatcaagctcatgagaatcatgcgagtctgctccaacaacataactcagtacattcgtccttagctctctactcagttagtcagctactcagcttcatccctttcactttctgaggaggagcatttccttagctgcttctctgttctcctgtaggtgatggctccccgtctcctgcaatctgtgtttgcagcttttggagatctctacttgtataaattttccaaacttattttcaatggtcaggttgcccagtgggcagtatccttaaactcatctatatatctatatgattttcatcattagtatatgaatacaatgaccttggatgtcagccttaacaaactgtttgcagttattttcccagttggttaactggttcatgtttttctgtatcacgcggactctatcaaacagcttggagactgttttgactgtggctggactctattactggtttactgcaatagagtcttccaaggcaacctcaatcgtttcaaagcagcatgctgtctgtgaacaaagtgcctcatcaagaaaagtggctcttctgatagcagccttgtcctgtgccattcgaccaacaagtgctgtaacatggctatatgttggtcttttggattttattcagatgaaatcaaaatgtcgttttgtccttcttgatgtcattccaatagggtaagttattgttaaaattcatggcaactttctatgttccgttgtctaagattttgtgaatttcactacactggcttatctttattgtttcttgattttgcacactggacttatgcacaatgctgacatttttttttcagtcgtccatgtcaagtcccacccccaccctcaattctttgttttttgttttttttttgggaggacgtatgttgcttatttgttgattctgttgtgatgccattttttttatctttcccaatgtatgactattcgatataatttgtttaatctttctgcagggccattgtccttgcagtaacaacactccttgattggtggatgtttggttcccgtgttatagtaccacttaattttttgaaattcaacctcttctcttcgggaggagactactatggaacacatgtcttccactggtactttacacagggttttccatccatgatttggacattcttaccatttgcaatgtacggtattgtaaagtctcgggaatggagactttcaggtctaattgcttgggtattaggggtttacagcatacttggacacaaagaattcaggtattcgccttttattggaagtgcccttgtagtcaagtaacctcttctcgttattcacatgctgtgatacaaatagattgaatactgcagatttgttcttccggtgctacctttagcattgatgttctcaggttactgcttagctgccatgtcacaactcaaggccaaaaatcagcatgggaaaagaagcctttcaaggttgcaactttctgttattcttcttgtcataaccaatgttcccatgtccttatatatgtccttattccatcaagtaagttttccatacttccatattgttgtattgctctatgcatctagggattacttttgttgcttctccattatttccatttatatcccatattcaacactcattgtggcagaggggaacagaagatgttatgtattatttgtcaaaagaagcccatgatggaagagtgaagagtgtcctctttctcatgccttgtcactcaacaccttactactcaaccttacattacgatctacctatgcgctttttggactgcactcctaggtggttattttctttgttcttttgaatgcaaaaatatttaacctttcatatctatacttgttcttgaatacatacgtccctgctgactctttctactgcactcagtgataacaaagggaccttggatgagtcagatcgtttccttacaagtccatctgagtttgtgggtggggtttttggaaatttatctacattcagtcacattgtattatttgagtctgaagaaagacacgttcttcagttgcttctgcacaattcctttcttgaggtaatatgccattgtaccttagatatcacgttgtttctttttcacttcaaggttcaatagacacgcagtataccgctttccagcataattatttgccaagcagtatctgttactaactagtgtaggaatttccatgaatttggcagtattgtagccttcaaggacattgttttaccgcataacgcaactctacaaattttatatggagtccagattaacataagaaattttctgatttgtcattttgaattttaaattgcttacaaatgcaaatatttggatgccttaacagaaaaatgcttttgattgccctgctatttcattagaactacatacatacctagtattttgaaagatgacaaaaaaacatgccatatgcttgattcagtgggatcacacggcaataatggtaggatttcttgtttcgtaacattagtactcaaactcattaatacttgttatggttggcaggtgaggagatttttccactcccatttcaaggttgacagagaccttcagtcgtctgttgtggtttattcacgtagggatgtgttatgatttagtattgatctggcagaaaaggcctgttagctcgtctaacaatctccacgtgtttcatgttgttttagtttttcatttgagaaatgagctgtgttgttccttttttattaggtccagttagctggggttgtcaggtggaggggcccctccctctttgttcttgcttttcgtttgtgttgggggcttcgtcggtaatccatggattacttgcgaatcctttgtatcggttactttgccgttccttcggctcttcttcttaatgaaaaacgcgtgaagtcgcgatctcggaaaaaaaaagaaatgagctgtaacactgttggatacttctgatatcttgaccccttgaaacaagacgttatattacttgtactcaggtgctttatgacggcataataattcacagcttccattgagtctctatgcccatgatctgtgcttctaagataaatttgcagccttaatgatttttatatttaactaaaacgtaggaagagcagcctttcctaacgtcaaatgacacaaagggatagtattattgaggtgtgttggttcattcatttctttgttcacttgctcaaatatttggtaaatagagtcatctggtagactggtagatactaataaagcaatgaatactgttctgaataaatggagaatgcaaatggttagtaaaggtggttgcatactctctattgagtcatctcaaggatacacttcccacacagcttcaagggtgtactaacctatcaaacataagactacaacactactacatcagatttacaca

SEQ ID NO: 4962 - DNA, 5238 bp, Sorghum bicolor
gggttgtggtggtgtgaatacttgtgttaaacttgttgagcagctgcagcgcatctggatcggtcatcgtctattcgtctaatcaagctagctagcttgacgctgcagaaaagaaggcaaggaggcagcagccgggaaggaacgggctggatcaaattcctgagcagccggcatttcgacctagaagcccaacacggagcccgcatggtgagcacggcccacccaagagtccgggctcccctcacttgggcctacgcggggtcaccgaaatccgaagtcgtccggcaggaatttgtttggactcgtccaacggtcacttgccggtctgtcgcgcaggctcgctcgcagtcgcagagtcgtagctcgcacgcctgacaggccgtgccgttgtgcattcaaattccgcaccgacgcgccgggctgtacagcgacccgccgctccttcacgaactccacggtctaccccacttcatgcggggccagcgcgccgcgtaaccgtcctgtcagtgactgatgggcatcactttccagtagatcagtcgttgttttttaattttgcgacggatattcgcgcatttaattctacgagtataaaaccgactaaccgtagacctgctagagccgtagtagtccgtagagagtccgtcggtggagtggaggctcgtagtacgaccgagccgagcaacatggtcccacaggtcgctggtcgatcagcttggctttgacagctgctggatataagatttttttatagtctttttacagcctacttaggccctgtttagtttcctacctaaaattttttcatccatcccatcgaatctttagacacatgcatggaacattaaatgtagataaaaaaataaactaattacacagtttagttaagaatcgcgagacgaatcttttaagcctagttactccatgattagccttaattgctacagtaacccacatatgctaatgacagattaattatgcttaataaatttgtattgcagtttcctgacgagctatgtaatttgtttttttattagtttctaaaaacctctcccgacatccttccgacacatccgatgtgatacccaaaaaattttcgtttcccatctaaacaggcccttatataatactcacagattttcttggtttttgagtagttaatatatgacccatatgtctcacagacttttttggtttttgtgtctgagccggctgtaagtttacagcccgcttttactttctctcctccaccacagcatttagtaggcttacatcctactgtaatactactcgctctgacgcgagcgacgccgacgagaggagaggagaggagacaggatccccgacccgctccgcatgccggggcaagggctggtcctcgtctcctcgtcggccgggctggtcaccggtgtggtgtggggccagccggcagccgcccctccctcccgcagccccagggggtttgaatactgtacgtgggaggcgaggcaaaggcagcgtcgggtcgggctccttttttttttgtgactcttttcgctttctttcggggggaataaaacgctcccccagattttgaacgttgaagctcttgactcgagcgcaccaaaaatgaacgcttttcgcgtaaagctaaagcttacacgacgactacacgactagtattactactagtagtagtaaagaaatttgaaatattccgctctttcgcgtgtacaacaaatggagacccgagtagagcatgggccgggcgtacctaccgtgtcctctcgatacgtgaccgtgtcgtgaagtgctgcacagggcgcgttgattagatcctgtaaacacgagggcaagcaatctatgggtaatcacggcaaggaaggaacagtggcagcaccggcgggtgcagagctgtcagctcgtcctggcccctggccggcctggcctcctccggagggcaacttgcggcaagtgaccttcttgaccggcccttcgagccgtctctctcccccctccctgtcctgcggcctcgcatttacaccgcgcctccctaggccagcggtaacagcaggtcgcacagccagccaggcggcagccagctgcgagcggcgagttctttaaggaggcggcaggccggtgccggtgcctttgccttggcgtggagtggagtggcctgcctcccataggctacagccttcccggagaagacaagcaaagcgagcgccgcaccattccgttcttgtccgttgttcctgctcccttgctgctgctgcttctcggagccactagttgctgccgtgctgtgctgcctcttcgtactgtgagtgagagtgtgagggcggagggccgcagcctgagcgggagaagaagaagaagaagaagaagaagaagaccgcggcgggagagagatgagcgtgaccaagttcatcaagtgcgtcacagtcggggacggcgccgtgggcaagacctgcatgctcatctgctacaccagcaacaagttccccacggtacgccgacgctttccttcgccgcgcccatctcgtcggcctcgaccttcatgaccagccatgagatttctgctcgatttggtttcccatccgtttggctcgctcgtttcttctcaccttccagtacagaaatgctacgcattttttttttttacagtttggtttttaatccaagctactcgtagtagttgttccattgatgctttccagcattagcagtagttaggcatttactcactcaccagtcaccatctgctcctgtccggctgtccctttcctgggatggaagggaatggggatcgtcagctcgcgaggcgcatttcgttctccggttgctgaaaacctgaaactgacggcgcctctgttcgtggttcctgacaggattacatccccacggtgttcgataacttcagcgccaacgtctccgtggatggcaacatcgtcaacctgggcctctgggacactgcgggtactgctgcttcttccctttctaatggtaaattgtttacacgcgcacagaatctgaaagtgttcccttccttctctgtttcgttcagggcaagaggactacagcaggctgcggccactgagctacaggggcgcagatgtgttcgtgctggctttctccctcatcagcagggccagctatgagaatgttcttaagaaggtatggtgataggatcaaaatgtgtgcttgtcttgcctggcgggcagtgtgtttctaattgtagatagagaacccaagttgaattgtttgtagtgccagtgtctgtgaagggagaggatccagtcatgaaaacatcaaaagttccagtgtacatttcagatatctaaatctgacacattatcatagctgcagtggagtttttttcccctttcttgggccacctttggccaatatgcctagcagtttctgcctttcagaatgtggttatgatggctggagcattatgaaatgatcattctatttctgaacaaacagtggatgccagagcttcgcagatttgcacccaacgttccggttgttcttgttgggaccaagttaggtgaggaagtgtgctgaacgtgaccttaattcatggactttaatgccacatattcgtctgcgtgattgttcttccaagatccaattccaatagctaattaaggcatttggttgggctgtccagatctccgtgaccacagagcctaccttgctgaccatcctggagcttcgacaatcacaacggcacaggttcgctgaatgccaccagcagatagttgttagaagtgcgatacaatttctcttaattcctcttcctcttggtatgcagggtgaagagctgaggaagcagattggtgctgcagcttacatcgagtgcagttccaaaacccagcaggtagtcatgacccatgtggaatgattttgattggttatgtcctgtttcaaatacggttagctgtttggcaattaaaattagacatgtatggattgttggtaatagacaattttactgactttttgtctgattatgtggccacactagaatgtcaagtctgtcttcgatacagccattaaagtggtccttcaacccccacggagaagggaggcaatgcctgccaggaagaaaaacaggcgtggctccggatgctctataatgtaagcttcatctttccaccgtatactaattggtaatgtaagcttcatctttccaccgtatactaattggtcatatgatggtaatagtagtccgctaatagtgattacaatccagtgaaatatccatttatcagaaaacccagcatatacctactattatgtcgagaaggcgtctggttcatctacttctgttcaaacttaaaacaaaacatttggaacaacttttgttttaaaagatgatttactgatgtgaccttttttgtgtcttgcccgcaggaaccttatgtgtggcagcacatgtgctgcttaggagtcttagaacactgaactggaaggaggtgaaggcgtgatgcatggtgtgtatgttgtgccaaactggcaagttaatttgctatagaatgggaccgcatggatgactgctgcttttgttttccttagctcatctgctgtatgcttgggttttttaggcgtagtgcgtcaggctcttcaagtactgacttttaccagactgctgtgttatgtaagaagtttgctagacgaggattgctgtaactgtaatatgttctccgagagggatgtggtataactaagatacaagtaagcttgagcgtgttctgcactgtgaatgggcggggctatattgtgttgctttgctaaatattctgtgaagctagatgaggtaaatcgtatgttcacgatccatttaggcgtatggtaacgtcatggctgcgtcggtttggtccaagcttggaatttcaattcctcaaaacactccagcgagcaaacaaacaacgcagttcagaccctggagtcaagcctgctctgattgtgaaagggatctttgacagtgacattgtttaacggcacattacaatcaggctcgcagctatgtaatttattcccatcctcagcgttttcatcatccgatagaggtgcaacttgcctttcgccggctcatttgctcaacaagtccctcagcttttcggtggctgacctcagttcggcagcgatgcctacttcattggccgagtgccctgcatccggtaccacctgcaacataggcggtcaaattatcgatgttgaggcacaattctaaaaaactggtgaatt

SEQ ID NO: 4963 - DNA, 8311 bp, Sorghum bicolor
tttttgtccatttaatttcatctgttaccccccttatcgatccttctacttttcaaagattccagtctctgacaacgatgaactcacctattcggacatccagcgagaaacagcttgcggattgcaggggccctgatcgtggggacgaagaggtagactccttcactccagttcgtgcaagctctgcagcagcacagttgggaatcaacgaaaaataattccttccttcttaagagaagagaaatgaggatttgtttagttcgcgaaaatttttagctttgactaccgtaacactttcgtttgtagttaataattattgtgtaattacggactaactagactacaaagattcgtctcgtaaattacaaattatttcgtctatatttaatgttcattcaatgtgatgagaaatctttaaatttttttggaaaactaaactaggcctaatcacattgacagaggccatcagcgacgtgtgggcacattatcgacaagccatcaacacctcgctaatggcgatctcatctcgaagctagtatttctatatattattattaaaaaaaccacctagtggcgatcaatcatgcacgccgcgcagctgctgaagatatctctagatatgggtactcgtcaggacgttttccgagcgtgcggcgtccaccccaccgccaccacaagggccctcgggacaaatcagtcaaacagcgggtggcgcgcacgccccacggtcacggcgccaggagcaccagccaccacacccacacggaccgcccgggcacgtaggcccgcgggggtcaccactcaccacctccgcgcgcactggtggaccgcggtcccgcagcagtggaaaaccaccgtccatccccgctcccacgcggccaacgccacgtcgcctagacgcggggaaggctcgcgcgcgactccgcgcgcgcactggtggaccgcgacgtgacgtgccgcccgcgcgggcaaagcaccggggcgcgcggggacgtcgcgctcggggggcggtgggtggattccccgggcgaattttccagcggctgcgtgttgttcggctgctgcaagggcaaggccgcactactactgttgggtgctagggagttcgacgctgaagctgagctaatcgcgtcgtcgcccggggtggtgttgtcacttgtcaggtcaggtggttggaccttggacgcggacgttgacgtcaccgcaacacgaggcatacccgggagagtttctagacacggttcacctaattcaatactcttcgttttatggagtaacgttttaattaattaattaattaattaattaattaattacggaggatttattagaacaacctaccatctgttttcaaatgttaggtccaattcaaaacggagaaagccggatccactgtgaactcgtcaaagatgtcagactttcaagccagtttgacaaaaatctggaaaaccttcaattcgcagtatcgagtgcgcgactactgattttttcttttcttttctttttttaaattttaaaaaagaagtacgaattcgaaataaaaataaaaataaacgagcacgagctttttttttttttttgcgctaaaagagtacgagtactgttgcggcagctgcgatccgcgctcagtacgtgtgggacccaggcgcttaatgaccccacgtgtcatggcagacaaggcgtataattaggcgcagggatccgggattaatttaggccttgtttagttccaaaaaattttgcaaaacaggtactgtagcactttcgtttgtttgtgacaaatattgtccaatcatgtactaactaggttcaaaagatttatctcatcaattccgaccaaactatacaattagtttttattttcgtctatatttaatactccatgcatgcatttaaagatttgatgtgacggaaaatctgaaaaattttgtaaaattttttggaaactaaacaaggccttaggcgagtgagaggcgcacgtcgaggatgccactttttcaattttcggggccgtttcttcgccatttttttttcctctctctttctccttcctctcgctcgcttcccttccctgctcccttcctcctccagccccctttattcctccatccgctcgcgccaatctcttcagggggcgggcagggatcggtgcccgccggccgcccgtcatgatctcctggcggcgcagcgcgtcatggctgtcgtcggcgtcccgctcctcgcttggcgctgccgtcggcggggaggcgaaggtcacgccggaggtggatccggcggcagcccaggagatggaggaggacgaggaggccgacgaggagcggtggtcgcgcctgctgccggagctgctcacggagatcatgcggcgcgtggacgccggcgccgagcgctggccgccgcgccgcgacgtggtggtctgcgcctgcgtgtgccggcggtggcgcgacgccgcggtctcggtcgtgcgcccgccgctcgagtgcgggaggatcaccttcccgtcctcgctcaagcaggtgagacacagacaaccaccggaccgtaacgtctcatcgtggtaatactggctcttttgatctgtttgtgtaaatcacctgaatctatatggctcgaacttgctgtgttcttgaggatttggggccacatggttatcgaggctgaagttttcttattacccatttctttccttgagaaaataaaaccagcagccacacatcctatgggcatgtttgatttgaagctctaggtgcaagagatgtctaggtgcacagatgtcttctgcgcctttttcttatacagtttgactcgatctcggttgatctctggatcggttgttggatttaatcttcttcaaattaaattaattttctgtttctaaataggcgtctatgcctacacaattttatttgtacgcagaaatgcgaacaatttgtatatctagttcttttgtggtctgtttacaaggatcagcagatccatgcttgtactaacaatttgtttatctaattcttattgttcgtggggcggcgctgcagtgttccttgtgcgttagaatttagaacggagccacatgtccatcttaatctctatcctcctattttggctacgtaacactatatttttggtggctagtgctaataaagtatggcagtagtggagaagttggcacaaacacagactttctttatttatgtttatatgtgatagctggatgttgtttggtatgccaatagcggtatgataatacctataaaagcttttcttctgtgcttgagtttactaaatattaatttaatgtatgcttatattatttcttttccacagcctggaccaagggatgcaccgatgcactgttttatccggagggacaaaaagaactcgaccttttctctctatctcagcttaacacagggtgagtaagcatgggtatcttcttattccgccatgcttttgatttcatggtatcatggatctggttcacttggtggattgagataggggtttcagatctcttttaatttgaatatgtagtgccaagtaagcaactaaaaaggctaactgactttctgaggctcccgatccatctatgatgtttgaaatggaatcctgtaattctgtcaaatcatgtttataaaattgaaagcatagccattggggccaaataaacaacaaataccagctggcacctctgctgaggttacttcacatatgacttgtgatgttgcacatctgtacctagtcttgtttagaaaacaggaaagtgaatatatagtttgcttattcctgtaatcatttacggctttcttataccatttgacaaggacctgtacatctactttgccatcccacctacaatatttatagtgttctgcctaaatatagtcctattcgtttggtaggaagattataccatttgatgaggacctgtacatctactttgctgtctcacctacaatatttattgggttctgcctaaattaatcctattcgtttggtaggaagttttgacttatcattgattgttgaaaaaacattcaattgaatacattggcagtgattcttactcggcatctacttgatttgatcttaacggctaatataaattttggaaatctaccttgctggcataataatatatagtagagcttgtgaagtagatgattttgcaatgctaatggagttttggaaactctgcatgatctatttgtactcacataatcagtttaacttatgatctgtgaaagcaagaaaatgttgaaatactgggtcctgtcaagtgtatgattggctatttcactgtataaataaggttacagtttctcacaagtatggtatgtagagacaatatcgcttgggaacttgaatccacaatagtccagttgatctcttattccctgctatatcgatctgaaataagccagttctagagattgtacaatgaagttacactttgtctggaattcttgactgcatgttcatgtgatatttaatttattttgctctcttggcagctctaacggataaagggaagtttcttttggctgctcgaaggttcagacaaggagcacatacagaatatatcatctcttacgactatgatgatctgcacccaagaagcagttcatatgttggaaagttgaggtaaggtctaatatgtccagaaccttattttccaatttgattacctgatttgtttgttgtgcatgcccacgaggttaagtgttcatcttttgactatatgttagctgagttctatattatgggcataaaactgtataatttgtgtcatgtgccttatttccattgcttctataattgtttaaacactttagtaaattaatccatcatctccttatttctggtagttatattgtcaatagacactatccacgttcatatgcattgccatattctgtgattgaatcagcttatgagaaaattgcttgtgtgaggcgcatctatgacagatttctgtggtatattcagctagcagtggctgaaatcctgtttattcataggttgaggttctgtttcagttacattgacggattgtggcagcttttccttgtttttcaagtcagtcagtcaactgttacatagagttatttgtatgaaaacaaagaaccaattcaatcattggataatctactccagatgctgtcttgttattgccaaaagttcactataggggtatagttaacactgttgcgttacctctgaacttccactaattgttcatgccactctttccttccttcgctataaattggctacagcctacaacacgtccataactcaatgtacctgtcattgatgccccagcacacagccgaaaacatgataataccctgtatcatactcttctccaatgatttcaggtcgactggtcgaagctggtcgctctaggaccgaccaggcgattaatcgagattaatcgtaatcgccctggtcgtccagctatttcagggcatatatgcctatatatatacctctatatatactatataatatacacaatcaagccagcatcaagactacattagtgtttagatagtgaattacttgtgggatttggtttcttctcttttctgcactgtccagactccagaggtccatattgttgtcccaaactccccctgcagcccctctattctatctaaaccctaacaggccaaaaactaaagcccattagcccagtcccagttagaaaaggcccaaaaaaatagaagtctggtcgtccatcttacctggtcgtctgattaatcgtgattaatcgacgattaatcggacgaccagctttctggtcgaactaatcgagtcggacctcctaatcgaatcctagtagcgacctggacgattaattgcgattaatcgggcgacctgaaatcattgctcttctcttatacatattaagctaccatgatggaacgatcgattcaattttccatatagtagggatgcattgctcccataaatttattatgtgcaaccctaaagttttggtttttggaaagcttttaaaaacttgcattgtaaacaattgcatttaatcttgttgcaagtaccgggaacgaattcaaagccttcctcccttttgtgtttgtctttgattttccataatgtcactcaaaactgtggcccatccatgtgtatttgcagtagggtgtatggatacctgatgtagatctagctctagctctgcattatacacggtatctcaatgcttatatgcactttctcctgtccattgtcctggaaaaaaatgtgattattgaaagaattgggccttacatccatgagagtgaactgtagacaatgaaatacaaaaatagtttatacttacaaattgctgcaagggacattcaacttaaagctttcaaccatgctaatatctgtgtagaggtggaaaaacatcaacggatgttgtacagtgatgtttgacttaaaaagtttaattcttacagcacaaaatgctccattgtgatttgtgatacaggtaaatgtacatttggtgggagggtaggcagatgtagtatacagctggttgtgaggttcatttaacatatgtgctgtcagcgagacggtggcatatgaatgtctggacatgagggaacaccagaacagagtttgggttgtcattttgtcataactcataagcaaggaagcaagcacatgctagtttccatgccctaacccaactgaaactagtcctacagttttgtagagacatcagattttctcaatcctacatcactggtcctaacatagtaacatctatggagggacaccagactttctaccactttcaaatgcatttgatccagcgttatccgtgaagtaatagtgtcataatttggcactttatggattgtatgttcatattacgaaaggcattgttattataagaaaaatgatatcttgttataaagtttgcaagtttgccaataatactaatttgataacatgagttctgcctgtagatctgacttcttggggacaaagtttatcatctatgatagccaggcaccatatgatggtgctaaaccttcgcggagccgatccactcggcgctttgcaagcaagcagataagcccacaggtttcaggtggcaattttgaagttggacaagtgacctataagttcaacttcatgaaatcaagagggccaaggcgaatgcagtgcaatatccagtgccctgtaagtcagggcactatgtcagatccatccaaggagaaaacaccctcgtcaagttccttagatctaaagaacaaagctccaagatggcacgaccatcttcagtgttggtgcttaaatttccatggccgggtgactgtcgcctccgtgaagaacttccagcttgtggccacagccggctctggtggtccatggggcgttggagacgaggaaacggtgatcctgcagtttgggaagatcgaggatgatgcgtttacaatggactaccggcagcctctgtctgctttccaggcgttcgccatctgcctcaccagctttggcacgaagctggcttgtgaataagtgattgccttgtttaccaattatatgttggggatcaaattgtaggggatagtctgaactagttgccctgagcccctgagatgggagaaaactggcgacaagaaacgggcagacgttgcccctagcttggcttcttgtgatcgcctaaacgattgatttatatgatgtgcgtctatgtgatttatatgatgtgcgtctatgttgttgaagagatgacgatgacttattgttgtaaatgacactccctttcgtttggtgacattcactcataatgccttattccgctggtgtgcagtgtgctgttaaaccttttcttttctgcatttttcacagacgatggttgagttgtttctatcagacatgaatacatgatcgaccaggtggtgacggtgtgaggatatctagttttgtttgctgctaaactggtagtactattgtttattggaccagttatcatgcatgattaaattacgttgtcattaaattaccaagtgctccatctatatagatagaaatagaatcatgctacatgcccttggagattgctaaagaacccatcactacaacttatccattcctacatatccatcactagtagaataaaacaaccaggagccgctcgctaacagttggcatggtcagggtagcttccgtcatttctgtagatcgtgtacgcgaatttgccgttgcctgtcacgatggacgtccctgctggaatcaatggagcaccacggcaacggagcacgtttcttgggctgcacatggagtcccaaaaaag

SEQ ID NO: 4964 - DNA, 6794 bp, Sorghum bicolor; identical to SEQ ID NO: 3554

SEQ ID NO: 4965 - DNA, 10640 bp, Sorghum bicolor
  misc_feature (9079)..(9178): n is a, c, g, or t
aatagaacttgtgctagatctgataacaatagaagggagctccacactaaaactgacatcaatgatagggaccaggggcaagggcgggggtgttgggaaggttggcagccaatgttctacatgccagcacaaactggcctcaacatgttgtcccacactagatgcgttggcgacgacaacaacactgtgcgacaagctgttctcagatctggatctgagcccagcaataaagacatggctatcccaccccagcaacagtaaaatcagtgacttgagttgtgatggagacccaagttagacagaacttgtgccagatctgatagcaatagaagggagatccacaccaaaaatgacatcaatggtagggaccagggatagaggccagggtcctaggaaggtttgtggcatccaattctgcatgtcagcacacaccggcctcaacacgttgtcccacactagtgagttggcgacgcaaaccgcactgtgcgacaagctgctctcaaatctagatatgatcctaccaataaagacatagctatcccacctagcagtgagaaaatcagagatcaaaattgtgatggggaccaagttagataaaacctgtgccagatctggcaacaatagaaggaagctccacaccaaaaccgacatcaatggtagggaccaggaacaggggtaggggcgtgggggagggagggaggaggaggaggaggaggaggaagaagaagaagaggaagaagaggaagaagaagaagaagaagaagaagaagaagaagaagaagaagaagaggaggaggaggaggagggggaggaggaggagggggaggggatcgagcaaaggaggtggtcgacaacgcttggggagaaccctagccaggtcaccctaagcatcaaaggcctcatctactcgccattgcctatttttataggctgcaagttaagccaaagcatacgtcattgttgtgtcatgtctcacgcctaaacttgcgttcggaggttggcatgtgtaatggaattatcgcaagttaagaaagcatttataaaaattaaaataggtccattttgcatgaatattcttgatgcgtggaaatttagaaagcatatattcaaattagacaccatatgaaagcattcaagcaaaaaaatgtgagaaattgcttcttttatgttaaaaatgaagaggtaaataagattaaatattttgtatctttgatagtggaccctgagtcacgtgaaaaaattcatgactcaaacttttcaaactttgatcattaataaatgctaaaaatattactttagaaattaaatgaaaaccatagaaacagaattgccttggaaagtaccttcacgatcatgtaaacttatctctatgatctgtcaatggtaaaactgactcgtcactactcactagtgctccaagatcgatcgagtgcctcctttccaacccaaaatcgagtggacacacataattagaagcatgaagcggcagggcacacacataggcagaggtggacggggattggtagcaagcattgcacaaacagaagccacgctagctcctcgtcgtagtggtctgtagctctccgtgcatcctagcctagccgcgctcacgcccacaaagattcccacctccagctccatcgtgtagctcctccgatccgttgccgagattttccattttcaaaattaaaattccgtacatgtgggtcccacaagagagtaccctaaatgaaggtgtagaaaatctacgctcgtctggcttttggtataagcagcttcttcaataactaatcaacctttacgagcagtgttaatagctgtctagaaaatgttttaagccggaagcaaaggagagccatggccataactcaagccaacaaggccatgggtatcgtatagccagcctatatagctgtaccgcaaaaactttgcgagtgcctccctccctccctccggctccctccgataaaagccccaatccctccatcccaactgcatatcactcgcgtgctcgcaaacaagcgtccgagttcgaggcgtggcggcccgtttttgcatgttgcgtttgcatgccgtagcggctctgctgccggtgttcctccccttccgaacccttggccaccacctctcggccgtctcgtgattcgaatcactgctcccattgcgaacgagccgccacagctgttgccaggctcaaggagggctcgggctcccacacgcgccgggggcgatcgatcgatcggagaggcggcgactcgggatcgggtgagtcgttgtttcatcttccgcttcgtccgaaaccaacccgccgcctccctgcgtggcgtgatgggcggcctgcctgttgtgtccgcctgttgccgcctcgtcgtcgtcgctcaccaagcgcgtccgcctatgaatgctgcaggccggggcacggcggggagtcgcggcggcgcatgagctctgacgccgcggggggacagcgcagcatcagcaactccacgaggggcgacgcggcggcggcgatgccaacctcatcgccctttgtcgtcggcgacagcagcggcggcgcgggctccccgatccgcgtcgaccgaatggtccgggagcacggccgccgctacgacatcttcgcgtcggacgcgatggataccgacggcgccgagccggcgtcggcttccgcggggcccttcgccgtggatggggtccagtcgcctggccgtgtgtcacccgccaacatggaggatgccggcggcgcggccgctgggcacgccgcgcgaccgccgctcgccggctcccgcagcggtttccgccgcctcggcctccgtggcatgaagcagcgcctcctcgtcgtggccaaccgcctccctgtttccgccaaccgccgcggcgaggaccactggtcgcttgagatcagcgccggcggcctcgtgagcgccctgcttggtaattccgaaatttaatctcctcccaaatgcgatgtggcctggacctgtagatgcatgcaacggaattctgcgctgacagctagtaccttagttcatatgattttttttttctgattctgaaggggtgaaggacgtcgacgcgaaatggattggctgggcgggcgtcaacgttccagacgaggttggccagcgagccctcaccaaagctcttgccgagaaggtttggttgcagttccatgtcgtctgggtcaatagaacagtgaccttttgttatcactctgataatctagacattttttttgggtggattgcttgaacttggcagagatgcataccagtgttcctggatgaggagattgtgcaccagtactacaatgggtattgcaacaacatcctgtggccgctgttccactacctaggactaccacaggaggacaggctggcaacaacgaggaactttgagtcacagttcgacgcgtacaagcgtgctaaccagatgtttgctgatgtcgtgtaccagcactaccaggagggggatgtaatctggtgccatgactaccacctcatgttcctgcccaagtgcctcaaggaccatgacatcaatatgaaagtcggttggttcctgcacacgccattcccatcatcagagatttaccgaacactgccatcccgcttggagctgcttcgctcggtgctgtgtgctgatttagtcgggtaagcatacctatggattttctgtcggctgtcctgttgaatttgattgtcaaagaagtttaactgggtatcctttttattcttgatttacttaaagtacctttatgactttgattctgctttttgtgcatgcaaatctcagctcccaacgtccgaaaaaaacagtgtaattgggtcttttccttgtccactataaagttactctctgatcagtgtatagttaattgattttttgaggggttcagacagccaaagtgctagtatatttataacctcccaacaaagttttagaatatgaaatctggtgaaaatgaaggttctaatttgacagcatgaaaagcttgacagtttactcactgtataacagaggaagcggtactatagtttgtgatgattttgttttgtttctgtgacatattgctatcacggtaggaatgtattggatccacaattttggtgatgtttttttaaaaaattttgaactgattctgacctatgcatgaagtttggtttagattcaaaatcctaaatgtatttagtaacttttagttttctgtaaatttccaagaaatttattcaagaaggaccaagataaaaaaaatacaggccaatgtgtcatatgatatgaaattatcagttttatgtctgtgagttatttgatggtgctcttattatttttcttcagatttcatacttacgactatgcgaggcattttgtgagtgcttgcactagaatacttggacttgagggtacccctgagggtgtggaagatcaaggaagactaaccagggttgcagcggtaaaaatcaaaactgatgtttttgtgagccatatgttgtacacgtacttaaagtgtattgtaaccttatttccattcccttgataattccttatgcacatttctttgtcatgttgattatttatgagttatccaaaatgtatgtgcgaaatgagtgaatgattcttttcattcacttggctgaaatcttcagtttcctattgggatagactctgatcgtttcaagcgagcattggagcttccagcagtaaaaaggcacatcagtgaattgacacaacgttttgctggtcgaaaggtatgaaaacactcgccttttacttactctaggacaaacttaaaatcatttttataagaaatcagatatgaaaacaagatcatctattggcatatctgattttcttatcagttgctaccttttcttaaaccttccatcactatttttttacctccccccccccccccccccccctcccctcttcatgtacgttgttgttacctctgtaactcctttaactttgattttttttgctggcactgaatatattgttgttccttaatatagttttgtgttctttgctaatgtggtaggtaatgcttggtgttgatcgacttgacatgattaagggaattccacaaaagattttggcctttgaaaagtttcttgaggaaaacccagactggaacgacaaagttgttctactgcagattgctgtgccaacaagaactgacgtccctgagtgtatgagcgctttctgtgttctccccttcatttgctaatacttaatgcaagtctgcaagcatgtgtgcagcatagaaggttcagaaatatgatttgcttgcttgcatgagttcttaatttacagcttgacatcttctatatgaattcccttttcaagtcagctgcactgaaattatattattattatcattatcataggaggctttatttgggtatttattacattttgtttcggctgcacatccatgtttacacctgaataatgagacagataatcctactgcacgctttattttgtaaagagcttactcaactttcacatactgaatcgtaagctctaatgattcagttatgcagacattagagttctgaaagattctatatgcttaaaatgtttgactcttggggatgctgtgttgtcctcagcaaggggggtttcagcgacttacatagggctattgcgctagattagtggtcaaattacattgtgttacatgcacaatgatatatttcctttattagatgaaaggtgagtttggtcctagagtatctgcaatttctactatatttgtctcaaaaaaacacgtccacaatattacatttttattagcttccacagaaacctttgtggaaatccaagacaaatgtgaccagagggagcactttgtatgataagcgccaaaaaaaaacatattagatttatgttaatgaatgtttctataattgtgtttcatgcatacctggtcaaatttttaggtgctctacaacttaacgaacccacatatttgtttgtggttgaaataagtcttattagtaatcagtaatcacttttgctaggtttgccatgtatcccatagcaccacttctttttaaaatgggtttaatgctcttatgagaacctttgctttgggagaaatttaaacatattgttttacgattgatttttgctggttttgtaccatactgccatttatctgttctgcaagttcaacatgattgttttttatcactgaataactagtcactatgatctgcagatcaaaagctaacaagccaagtgcatgaaattgttgggcgcataaacggtcgattcggaacgttgactgctgtccctattcatcatctggtagttttcacactttaaattgctacctccatatctgtcttaggacctaatttttcttaagcattataccacatctgcttctgagaaggcagtacccgtttttaaggttctaattttgaagaactgatattatctgatttgctgttctatgtattacaaataagtatcaatgttttaactccttgcataaaaacttcaatgcattttctttacaagaatctgaaacaatgttttccttgcaggaccgatctcttgatttccatgctttgtgtgctctttatgcagtcactggtaatcattaaaattctatttatattttttttttaaataaaaaatctatttatactgacatttgggcagatgctttttcttcaacttcagtatacccgatttacaccaggttttaatggattttgtttatgcctacgttaattttcactgtttttgttcagatgttgctcttgtaacatcactgagagatgggatgaaccttgtgagctatgagtatgttgcatgccaagggtctaagaaaggagttttgatacttagtgaggtacctgaccgattgtgcatgcattttttttgggtgggtggggtgggggttagttttatttatttatttattctattctattctattctattcctgcaatttcagtttgctggggcagcacaatcacttggagctggcgccattctagtaaacccttggaatattacagaagttgcagactcaatacggcacgctttgacgatgccatccgatgagagagagaaacggcacaggcacaactatgctcatgtcacaactcacacggctcaagattgggctgaaacttttgtattgtgagtttctcatttccagttgccaagtttgtcattcggtggaccaagtcccttccgttataaatttgttaccactcaatttttcggatgattatccttttctttttcatgtagtgagctaaatgacacggttgctgaagcactactgaggacaagacaagttcctcctggacttcctagtcaaacggcaatccagcaatatttgcgctctaaaaatcgtctgctcatattggtaatactatatttcttatttcatacttgatagttgtggatttttttttcaccatgttaactgtcgttctatttgaaaatggctcagttgtatctggtagcaactttattctctgtagagtcactttgaacaattacatcttttgctcttatgcagctactgtcttcactctggttgttgccttacattttctggtagactagatcatcatgacacatttgtgttacattcaagtctccagtgattttttacattgatataggaatccagtaaaattttcactttcgaatttccataagaaggctttcaggacccttgcactttcaactactttatgagtcacattcgctgttatttgacagtaacaacttcaacaattcctgttatttgtacatgactggatgtagggtttcaattcaacattgactgaaccagtcgaatcctctgggagaaggggtggtgaccaaatcaaggaaatggaactcaagttgcatcctgacttaaagggtcctctgagagccctctgtgaagatgagcgcactacagttattgttcttagtggcagtgacaggagtgttcttgatgaagtaatactcagagcagacctgtctgttattttgatttgatcgattgacctttatattttccattagaactaacatatctctccatgtgtacagaatttcggagaatttaaaatgtggttggcagcagagcatgggatgtttttacgcccgacttatggagaatggatgacaacaatgcctgagcatctgaacatggattgggttgacagcgtaaaggtgcgtctgtatcatgaataataatgttatgttgcatcaaattaatatgaagcttctgatatcattcttttttctccagcatgtttttgaatactttacagaaagaaccccaagatcccatttcgaacatcgtgaaacatcatttgtgtggaactacaagtatgctggtaagtgttgatcttccaagcattctttttaaagaaggtctgtgcagtaacattttatttccactttctatttcaaagatgttgaatttggaaggctacaagcaagagatatgctgcagcacttgtggacaggtccgatctcaaatgcagctgttgatgttgttcaagggagtcggtcagttgaagttcggtctgttggagttacaaaggtcagtggtgctgtaagatggttcatgatgatatatggttttctccatgttagccttgttgaggttttacagatcatttgtctcctttctatagggtgctgcaattgatcgcattttaggggagatagttcacagcgaaaacatggttactccaattgactatgtcctgtgtatagggcatttccttgggaaggtaattttccaatgcttcacgctgttgctctgatctggttttatttaggataaagaaactgaatgaagaaatgaaagggttttcaaaatgcatttgtttttaatgctaggcagaaggatgtggacttattagaaaattcagtattcgtggtttaccttttatgtgaaaatcttgtatataaaactctttcccttatttgaaaggtagagctcttgacatttacaatcaaataaaaactttttatatgaaaattgaaatatgcatggatcaaagtcaaactgtcaaagtgaaggtggggaactgtgtctttcctctcnnnnnnnnnnnnnnnnnnnnnnnnnnnnnnnnnnnnnnnnnnnnnnnnnnnnnnnnnnnnnnnnnnnnnnnnnnnnnnnnnnnnnnnnnnnnnnnnnnnncttctaatccaacaatacaagatgagtctagtagtcagaattaatgaatagactgagtctctatggaatatccttccaagcaaagttgctgacagtttggatatgcatgcagatggcagttctgcaaaattgagctttctctatggattccacatatttccatctttttaagttcatactctagaaattcttatttaagtttgatactgatgattcttgatttatgatttctgtgcctattcttttcgactttggttcgtttgctaacatctgcttcctcgtgtttcaggatgaggatatctatgtcttttttgatcccgagtacccttctgaatccaaaataaaaccagagggtggctcagcttcacttgaccggaggcccaacggaaggccaccatcgaacggcaggagcaactccaggaacccacagtccaggacacagaaggcgcagcaggctcaggctgcatccgagaggtcatcctcttcaagccacagcagcgcaagcagcaaccatgactggcgcgaagggtcctcggtccttgatctcaagggcgagaactacttctcctgcgccgttggaaggaaacggtccaacgcccgctacctgctgagttcgtcagaggaggttgtctccttcctcaaggagctggcaacagcaacagctggcttccaatccagctgtgctgattacatgttcctggataggcagtaagtagattggtggagagcctccgggctttaccagagaagcaccttggcaagaaaaaaaaatatattcattcctcatttgcgcgacagagttacacccgtagctagccagcgtgctgtacaatcctgtacaaaatttatgctcctgatgataaaactgcgagaggggagcaaatgggaaaaggataaaggagtttagagagttcggttgcttctggtatgatatacaatcgttctccggcttttgatttctcattgcgaattttttagatcacgaatttgagctggtttgctacagttcttctgaaatacgccagcgcctgccacgtctctttttcttttgtcttaccaacttattatagttattagagattgaaatcttgtctggatgcatgcttagaggaggtgaggttgaaaggaggtttggagcaacgtgaggctggacagggattgcaggccctgacggaatcaacttgtacaggatcggagaaagcaaccaatatactaatgcagctcgtgcaagcaatgtgccatctcaatcatgggagctcctgcttggattggggtggcttgatccgtggggctcctctccaatcccaaccgcattcctgcattacttggtcagacaagccacgggccttcatgattacatattcatttcagcaatgcagttttggcatttcttatgcgctcgcttgcgtcacttgatcatctcacccaactcctccagtcgagctcatccccttgaaactgg

SEQ ID NO: 4966 - DNA, 5145 bp, Sorghum bicolor
aagcatagaaaggaaaaagggagaaataccacatgtatgtgttcattttgtactacatcagtatctttccattgatgattgtttataacagtgcttaactttgactgcctcatctcagcgtgtagtttacttactgaggaaagtcgttcaagagattgagcgccgtctttgtattcaagcagaacacataagaagtgtaagagaatcttcttaaaacatgaattttccttttgggcactcatatttacaatgaatcgaataccctatgctgcagcaaaatgttatcatcaagacaagagaacagaagtattgttcaaaaattaaagcacttgaaatattggtaaatggcacaaatgaagaaaaccaggtaataattcatttggttgattagttagacaaactatgcgtgtgtaaaagtttttacctcgtttaatattgacatgtagtttctctcttcagatggcaataaacagacttcagatagtcaaggtttgaaacttttcctatgttttcaaaacttctttctttattccatgcattatgtatgcttcaataataacataaagatctctgaactgtcagatacataatatccgatgtgataaaaatgatgagtcaataaacaatgatgttttactttgaccacttatactgttagtagaacttacggtagcagatatgatgtatcctcaaattgtcagctattatgtatatgatgttataaaaatgatgacacaagtaaacatctcagcattaccacttaagttggtaattagtaaaagttgtagtggtctatgaatatgattaatgttattatatctttttcttcttttagaatgagaagtcaaaaatcgaagagagaagaaaactcagtgagcaagatgttcatcgattaatgaaagagaaagaacattctgaaaatattatagcaaacttaaagaaagatatggaagccatgaataggttgcatgagcagcaacttgaacaaacggaaagaaaggcaaaggaaatggaggaacaactgaccaccaaagttaaagaagtagagtatctcttgctacaatcaaataagaaagttgaagaagttgagactgcctccaggataaaatcacagttatgggataagaaagaaaacaattttcagagctacacggataatcaacaattaattatcaaggtttgtttaccattagtgactccttttattttatttattaatccattttttatgtcatttattttctttacattccgctacttaaaaaatgcaggacataagaatattgtcgcaatcatataaaaacgatatgtatgcacttcaaatgcagtggagaaatgagatatctaatttaggtacgtttttttttgtgatatgctatacaaaagttcatagtaaagtatatttatttaatatgttcgacatttttttgctaaaaatctgtgtaggatctgggttaaaatgtttggttgatgctgctgaaaattatcataaagtcctggcggagaaccaaaagttatttaatgaagtgcaagaactaaaaggtatttttgttttgaaatgttttctttaccttagaatctaagtatagatgcgatagtcatgtttcaatcttgtcttttttttccaggtaatataagagtatattgtcgtgttaggccatttctttccggtcaagacaaaaagtctaccacaattgactacatgggggaaaatggtgagctgcttatatcaaatccatttaagcaagggaaggacggacatagaatgttcaagtttaataaagtgttcagtccatttgcttctcaaggtatatatgttttttataatttaaaactatctgattagttattacatgttaatagttttataatctgttattctctgtaatttcacagctgaggttttttctgacatacaaccactaatccgatcagttctggatggattcaacgtttgtattttcgcatatggccagactggttctggcaaaacttacacaatggtattgtaggatcaatcacaataaaaatattgttatcactacatagtaatgttactaattatgatacctgtttcgttattatttattctctagagtgggcctagcacatcaaagcaagattggggtgtcaattatcgagctttaaatgatttgtttgatatttcactaagtaggagaaatgccttctcttatgaagttggggtacaaatggttgagatatataatgaacaagtccgtgatctgctatcaaatgatattgcacagagaagatatcctttttgaactatcattttagcctttttcattatagtttttattttcaaaatattcatatattgatgatattcttgcatctagaaaaatattttttccttaacataaagaaacacttgggatttggagcacttctcaacccaatgggcttgttgttccagacgcaagcttgcactcagttaagtcaacatctgatgtattagacttgatggaaattgggcaagcaaatagagcagttggttcaacagccctaaatgaaagaagtagtcggtcgcacaggttagtcatgccaataactagtttcctctacatgtacttgagcatggcatcttattctgaatattttatttgcagtatcctaactgtacatgttcgagggttggatttgaagaatggatccacctctaggggttgtctgcatcttattgatcttgctggtagtgaaagggttgagaagtctgaagcaaccggggatagattaaaagaagctcaatacattaacaaatcactctctgcattaggtgatgtgatttttgctttgtcacagaaaagtgcccatgtgccttatagaaacagcaagctaacacaagttcttcaaagttctttaggtaatcaattatctatttactaccggtaaattataaatattaaatagatttatgcgaatcttgaaaatatttatgttagcttttgttttcttccaggtggacaagcaaaaactctaatgtttgttcaaataaatcctgatgttgagtcatattcagaaactataagcactttaaagtttgctgaaagggtatctggagtagagttaggtgctgcgagaagtaacaaggagggaaaggatataaaagagctattggaacaggttcttgtatttcttatttttgactttttctcattctgtttgactgtctaagcaattttagtttaaaagaaatagtatactgaaaaaagggcaagcttttgtatgaatgctacgttagtatttatcaaggttcaactgtcaaagcatggtttgcatactacaatcacttcttgtcctagctcctgaatcaaagtttaaagcttaagtgattttatttttttttagaatctttccaggctcttgctagctgagttttctatagtttatttttttttgtatttgtttcatgacgataaaccagtcaccagtcacagaacatccctaatgctacatatatactaagttagtagctcatcctttttctttgtgatgaaaccatactcttggatcaatcataaaatggaaactaaaaggggaaatttcaagtctgaaccttcttcacaccatttacaatgtccaaagtttgtatagttttagatatatggaaaaccaggactagtagtagagacgctgataatgatgtactacattttgcatgtgattcctgttttttttgctgtgattatctcggttttgaaacagcagcagttttgaaagagtagcattttacatattttatccaggttgcgtctttgaaagacacaatttcacgcaaagatatggaaatagagcagctccaagtcaccaaagacaaagttaaatctccaaatttatcatcaggcgaacgaatgcttaagtctagtgacagagttctatcagatcctctgagttatggtgagatgaatggagattctaaccataatttgacgggtactgcaccagtgagcttagatgaaccagaatatgaggacaatgcatccgatgatggtttatcaggtgaaaccgacaatttgaattcagctgctgagatgacagtggaacggctgtaagtcatctagactttcgttcacttcttgtaaatcatttacttgtaaattctctctttctttattcattatattcaacaatagcaagaatgataacttatttggtaatgttaaaattgcaggcataggtttccgtcaagaataagcagattcactctcacaaaaaatgggcaggcatctatgtctagatcaaaatcaaaggacgctaagactccaagtatgtattctaggccaatcagccatacaattacttgagcatgttaagctacagttaccgttctaacaaaagttatactaattgaataggtaatacaaaagctccatcgagccagctgacaggaggttcttcagtcaagggatctaaaagatggcaatagtaaagcatggtcatgttgctcgttgtgatgtgcttgtagttgaaatgtgaatttgctgggtagttgtaggaccattctatgattgtcttagaaaatgtgagacattccgctgacagaagacttgagactttcgtttgatcatttgccgagcaaaaccaaacaatgctcgattgtatgtgaaacattctgacctgtgaccatttgaagaggttggtgtgcctccagagttgtatatatgccaccaaattgttgcctgaaaatttccagtttgatgcatcctgaaagtattgagcttttctcaatctaatttcatataacacataagaaacattccggttttcaattttcttgaaacatgtttctgtttacttttataagcatggaaaactccattacatagaaacacgttctgtttctggcaacgaatttgttcagtgctgccactggtacaaataatttgtcaggaatctcatatattctgctacatacacataagagtgcattgtggttttcaattttgttgaaacacgattttgtttctggaaacgattttgttcagagctgtcactggtacaaatatagggattgtgaatttgtggtttgactatttgagaaacacgagaggatttttttaaaaaaactttgaaaatttacgcattacatcctggcaactcgccacataccagtacagatacaaa

SEQ ID NO: 4967 - DNA, 3534 bp, Sorghum bicolor
gtatctagttatatacccattctcctacatcccaagacataatctctggtcacttgcgtaggaaatccatcacacgcataacactgtataactttctatcttgacaaacaaacaatagcaaattacatacgaacaaccaatctgaccatccacttgtatagaaaatcttatacacaaaaaggtgctcgacaaacttttgcaatgcagtaaatttatagtcacgacaactttttctacaaaattatgtcaaagtacaataaaaattatggcataagttttgttccgtaaaatattatgtgatcatcatccacttgtaaaagagcaagtttttgtgtataagattttgacatttgaagctaccaaattaacttctcaggtctgcatgtttcttcgctgtacatacgtggatttcttccttttagggcccgtttggaactaaggatttccaaacgaaatgaaggaaaggaagtagaatacaacgtttggaagaaaggaagcaagttatccatttcctttggagtactgtaacaacaacacgattttgcaggaaccaaacgctccattctcgacattttaaaaatcacaatatactcagaaaagtagagacattttcacaagggcaaagttgtccttaatgagcccatttaacaccattacccgtcgttcacggaataggagtaaactgaagctttgttttcataaagcaagggtaaaatcacaacggtgaacaaaacaagggtaaaattacaattagatgtcaaaataagggtaagaacgcaatagctctaaaataaaatgaagatgcatgcatcttttatgttctttttaaatttgttttaaaatttctagaatacattgtattacataacacaaggagtagaagctaatagaatatactccctctgtgcttaaatagccgtcgaggaaaaactttaattacatatatattaaaaatattaatatttatggtacataattaatatcattagaaagatatttgaatctagtttttaaataaatttatttaaatatataaatgttgcacatattttttataaatcgaattaaacatgttgcacgcacaccaacaacgacaattaaatagggacagagggagtaggcgctttatggttgtgtgtctatgttcatctctttaatcacatctcatgttttggaatcctacgttatatttcctacgttttaaacatccttgtctatatttttttatgcttttgcattcccctgtttaaccataatatctacactctaatcctgtgatcctttgttccagacatacccttattttggcattaaaaaaaatcacattctttatgttgcaacactgatgtttagtaatatttaaataaattgtttgttcatggttgcatcaatcggtttctcgtaggggtggatctacatatatggagaatagtggatgtggacgcaccatgcaaagacaaaaaaaaaagtgattatgataaaaggttcatcatattcgcatcttcacggtaaatctatgcattcacaagaaaagtataccactctacaatttgctctatagtgtgtaaagagttgaatttttttctctatttttcgtgcaaaagtttgtatgtatttatattaagatagaagaaaagttcaatcaacatgtcttaatagcatcataggtggtcataagagatttacaaggagtcaaggacgctcggatgcctcaaatagttgaatttgctagtctgtaaaagagttccggtactagtcagtgtttgttttgcagtggcatgcaggactccgacactccggccatgcatacccaccatatcgtcgggcgctgatcacagttttatcccgccatcgccagagagcagtcagcaagcagcccccgaaacatggcgaagtccaaggcggagcgaggagacgaacgtgtggctcgccgcagcgaggcggggatccggtcccccgtccccttctctatttagccaccggtcccgtgcatgctgctagaagtagaagctcttcgtcagtcacctcacaaacagttgggaggaggagcacgatcgagagccctccggcgagacgacctccctctccgtcctttagcgcgcgaccgaccagtgcgcgtgagatcagcggcccgggcgatccaagatgtcttggcagacgtacgtggacgagcacctgatgtgcgagatcgagggccaccacctcacgtcggcggccatcgccggccacgacggcgccgtctgggctcagagcgccacattccccgaggtcaccacaccatcacattacaatcccctgttagcattatgttatggttattgtttgcgtgtgatagatcccgctgacatgtcaggggaatttttgttgttgtggcgtccagttcaagcccgaggacatgaccaacatcatgaaggatttcgatgagccggggcacctcgcgccgacaggcctgtttcttggagccacgaagtacatggtcatccaaggtgaacccggcgctgtcattcgtggcaagaaggtgattgattgcccatcgttgctgctcctgttcgtttttctgtggtggtgttacacaaatctttagaattgtttcttgttcttttcccccagggatcaggaggcatcactgtgaagaagacagggcaggcactcatcattggcatctacgacgagccgatgactcccgggcagtgcaacatggtggtggaaaggctgggcgactacctggttgaacagggcatgtagccttcctggatgtcgatatatggcttggctcagttcagatttctttcaataacaaagccaacaagacctttgcatgtttccctgtttgcttgcattggctcttcttctccaccgccacaagatgaagatagtagctgctccgctggaagttttcagttctggctcactcgctgtagtttacattcttgggttgcttcgatcatttggctgtagcgtgaatcgcatggaggaatgccctaatcactaagcaagtactcatatatatatatatatatatatttttttctgcagatatttgaatctcgtcgctcgtgcatgatatatcgtcccttacaatatttttgaacgaacagagggtgcctattttattattaatacagagaagagtataacaacaaaatatgaactcatgataactcaattttcaataaatacttgagtgacagcaaaaaaatattgttgttgtactcaagtgttgttatacttgagaaaaaccgcgggtatccatttggagggtcatctccatccttgagtacaacaaaatgttgttcatggttcatttagttacattgtataacaacaaaaaatattgtattattaatacagagaagggataacaacaatttcttgagtacaacaatatatttttttgaatgagttcatttggttcatttagtaaaccgcgggtatccatttggagggtcatcacatccttaatattgttccacaagcctttggccgctaaatattctgaattgctccttgttagagtttatactgcaaaattag

SEQ ID NO: 4968 - DNA, 5311 bp, Sorghum bicolor
tggtatcccgaagcaaagcacactataattcatgatgtgatagacttaccaattaaaacaccacactacaatacattaaaatgatcatgcaacactcataacgtgaaacatatgtctttctcaccaccagccacaaactgagacttgcatgcggaaacagatattttggtcaccaggcataatttcttcctatcgtgttaggacttaggaaactctcagaagtataatacatgaaaaataaactagaaaaactaatgggaagatataaaatccatcaaatgtaacatgaaaaaaagattgcaaattgacaggatcagatggtactacctcatgcccatgtccatgaccatgagagtggtcatcatgcccatcccaaggatgacgcaaaccctgaaaccatttcacttatttaacttgtattcaagtaaaccaagattaagtgtagggtcagggttggtaaacagaatattaccaagagcgtggcaccgtcctgcttagccctgtagaagacccagaacctgcaggcagcacaattggttaaacatgccacaatcacaactgtagttccaaactctgaagcttaaacatatctgaaataactaattgtcctcgacacacttagaatttcagaagaaatatcattaaaaatcctgagctccagcttgaaaaacatgttagcttaactttttctaatcaggttaatgcatctattctcacatgatcaggttagaagctcaacaagagttattaactgtccaaatgacctgcagcccactagagactttaatatcatgcaacatgcatttctgcagaccatgctttgtgaaaacagtgcttgatgaggtagtttccaacttttcatgttaaaaaaaatcttagttttttttttctatttggtttctcaaaaccgggtcaacgaagatgcaaaagtggtcaatataaacatcaactgcaaactccttttcaaagctaacagctcacatgctcagagatcaatatttcatgcggtagacatagtcccaaacctggtaatatgttttgttcaaatggctagggggttgcaaaaggaacaaaacgacttgaatcaaactcgtctgatgtgaagatgaaacgagagttgaaggtcgttcccaaacatgttgtaagtagaacagggagataaagacatcgaaggcgttagaaagttcctatgaaattaccaaagagcctcaagctagtcaagcatgaaaagtaatgtcgcaatgatggttacggtatgcacagctgcagcaatgactgaggtccatcttgaaacgaaaggcagcttaaagttttttgtttaatgcatctatgttcacacagtaaaaggagctcaacaatagtgactgtccaaatgacccatatctcacagaaagggagaggggctcaacagatgatttctagagcatgattggacagttactatgttaacgaaaacttcagagcttactatggtttctcataactcgggtcaatgaagacgcaaaaaatggtcaagataaaatatcagtcgttaagccacagcagccttttcaaagttactaactgccgagacactcagagatcaaatttccgtaatgtagacagtcccaaacctgggaatatggtttgctcaactggctagggttgcgaaaacgatgaaatgaacccaatgaactcatttgatgtgaagatgaaacaagaattgaaggttgttgccacacatgttgtaactagaacagggacataaagccatcaaaggatgttagaagttcccatcagatttacccaagagcatgaagcatgaagaaagtccgattcggccttcctaatctcgcaatggttgaggtgtgcacggttgcagcggatgcatcagccagtggacagtcctaccgaaatgggataaggtgaacggcagcgagccagctctatttccacatccccaaatcggattttcgctatgcaggttgcgcctgtagtttgcgacgttgcgcacaaacagaatggcggcgtctaactctaaccccaaaccaatcgcacaatttatgaggaacaataatccattaaaaaagaactattcccagcatttcctgatctacccgtgcggaagcccacagacgagggcgaatcccacgcgccatggcgttcaatttgtagaaggcagggaggtgtccaggcaggcagccttgaatcggagggaagctaccggattcggaggaaatggacggatcgaagtggtgcgacggaaagggggagcaagggggcgcgcatgcgtaccacatcacggcgcagaggcccttgccggcgacggtgtgccagcgcttgttgtgcgggattgtgtagcccttgtaggtggtgccgccatgtgcgccgccgccgcccatcgccgccgactgctcgcctcgccttgtcagtcgtcgcgggtgctcgtctgtggtgcgggtggtgatggtgaggctgctggatctggacgccccccacccgtctcgcgtcgcgtatccctccccagacgggccggatgccctgcttggccacagccttagtgggcctgacacaagttatatgggccggcccgtcactaagttaagttctctaaggcccagccttttcctcggcgacgagacaagaagaacaagagaggagacgaggactaggaggaaagaaaggaaaccctagcccgctacacccttggccccttctctcttcgtggtcgccgccgccgccgccgcgcccaagcctctccgactcggccaggcgacgtcctcagctctcctcttcccttctccgtcctcggcgtcctcgccgccgtcatcggcgcgggtggaggcggtggtgctcttcaacgtctgcgacagctacgtgcggcgcccggaccaggcggaccgcgtcatcggcacactcctcggctccctcctccccgacggcaccgtccacgtccgcaactcctacgttgtcccccacagcgagtcggccgaccaggtcggttcagatcacatctccaaccaactcactgattgattccactcgttcgttcgttcgcattggcttactttgctgatgctgggggtgatgcaggtcgccatcgacatcgactaccaccataacatgtacgcctcgcaccagaaggtgaaccccaaggaagtcatcgtcggctggtgagcaaccatccccgggtctcacaattgtagtacatccatagcgcggaattgggcaattttttgcaaacttcatttatatgcaatagctgaatccccaatgcatagtatttttgtttttaagctgaattagttttagtggatgcagtcatttttttaaccaaatacaccacacatcttgttgctagcagctacagctattttcctttttattgcattgtggacagaatagatctagtgtaattagttccgtgtttgtgcttcagaataattgatgggctcagagctatattgtctgttggttacttggtttgttaacttagaaagcgcatttccaaacactagaaaagtcactttgaaaagtctggaattaatttaccaagtatccttactaaattgttcaaacctttttgttgcctatctactgtctgtttgtaggttctcaactggatttggtgtttctgggggaagtacgctcatccatgagttctattcaagggaagtacaaaaccccatccatcttacagtcgacactggcttcacaaggggggaggcttccatcaaagcctacatctcatccaacctgtcccttggagataggcacctcgctgcgcaatttcaggaaatccctctggatctaaggatgattgaggcagaaaaggctggatgtatgtgtcactttcctgattgctaattcattgtgtattatatattatatatgaatgattgttttggtttgttggaaccgaaacacttcaaacaatatgtaaatgacatagaagaatgaacttagtacattgaaatattgaatgaacccataaactctgctagctgtagccttccagtacttgcaatgttaaattcgtttatgttcttaaatgtattgatttaattaccagtgactagcaaatgtttacctgctggttggggaaaatttcattttacacttatattagttggtctttcaattactttgttgaactcatgaattgtcgtggctgtagtttgatcgtaataatgtttgtgtttccattggcgtattttatttctcatatatagttactgtttgtcagaaccatattgtcgctgctacagtctcaattttagtagcagaacatttggaacttccatcatagttttgagcttctgttacagtcgagatcctgaaatctaccatggtagagaagctccccaatgatctggaaggaatggagtcctcaatggagaagctttacattcttattgatgagatctacaaatatgtcgatgatgttgtggtaagaatctctcatgcaactgtgtcctattttattttgatttatttggatgcaggtgtcaattatctctctatgacattgtaggaaggacgcgtggcacctgataacagaattggaaggttcatctctgattctgttgcttcaatgccaaagttgtccccagctgctttcgataagcttttcaatgacaagattcaggtaaattacttgcgcctcttgatgtctgtgtaggtagtgtaggacggccaccttgctttgcttgctgatgagttaatgattactgaccccacaggataaccttgcgctggtatacctgtcaagcatcacaaggacacaaatcaccatcgcggagaagttgaacactgctgctcaagtgctgtaattttggtggttgtggcatttggttggacgtcgatgagttgggtgcaatctgtgatgtttggcatacgtgtccaatttggtggcaggaatgcatttttgtacttgttattattattactaaatgatagacctgatgaaacgggttagtcaacaatgagatcccataatcatgttgccagtagagtggtggagggcgagatgtttctgtttggatagtattctgtgcttcaggttcaatatttgtaatgctcgtttgttttgtgtaatgacacagttaatgacattgccgagctaacgccaatgtggaacaatgaagagatttgctccacattgacgccatttggaggtgcagtggcgctggaatgatgtctgtgttcctagagtgtccgctgggcttgctggatggtgtgttgatgtcagcgacctgaccacaatgctaatgcaatgtgatcctgctgtcaatgcgttttgctgtcctggtctagcaagctttgctcctgc

SEQ ID NO: 4969 - DNA, 5106 bp, Sorghum bicolor
tgcatctacttcgtgtgtgacgacgagcatggaatttgggacgcagatctttttcgtgactctggtgtgttcaacatgagaaacgggacaatcacacctttattgctagataaaccatttgtgcggccacgaggctatggagggtgtccaacgtggtttttccctactgcactatattctagcatagtatgatttcttctcaaactaacaacctttgagctgggaacatgcttgtcttcattttgggtattgtggattttttttttcacccacaccgatgtcctgtttttcagacaatattttcgtctcataacattttagcatgagcataagtcagattcagcgacatgatacaaatgatcttgctttatgtatcaactaattatcaaacgtccaacacttgctttgtttcagacatgcttttaacgcacactttcaaatgtaagatcatcatgttatataaaatgtttcatggtcttgtgccggattaagtttacacgtgctcctagcttgggacgacacaagtagctcccaaatgtttggtctcaggccttgttcagttcccaaaattttctgttttcggaatactgtagcactttcatttttatttgacaaatattgttcaatcatgaactaactaaacttaaaagattcatctcatgatttacaggcaagttgtacaattagtttttgttttcatctatatttaatgctctatgcatgtgccgcaagattcgatgtgatgatgaatcttgaatttttttggaaattaaacaaggcctcacacgagctctttttcgctttcttctttcctctcatagagctagtgagagcaggtgaagccagtttttttaacttcatctactccaactaattatgtgagaagaggagagagaagtgagaataaagcttctaaagtgtgcatgaacaataaaaacttcttctgtctcaaaataactgttattttgggctttcgaatcaaatgtttaactaaatttatagaaaatacgtgtaacatttgtatctttaaataaatttattaaaaaactaaattcaaaaatctctatgatgataaaagttatgtaccataaaattaatatttttcaatatatatttagttaaaaatatttctcaaaaaatgagaacaacaaaataattattttggtacgaaaggagtacagtacgtgagaagttagagccgagaggaaccctaacacatgaggcctaagagtagtgtcaactccgttcacgactttccgttatttacagtatcctctccgtttttttttctggtgcgtggtgtcaactccggtcacgactttcctcgcgatcgcggtcatgtcgtggcagccccgtcgtcgggaccgggaaacgagaactcaccagtcaccaaaccatggcaggccccggaccactgaactccctcacgcacgggcccattttattgtggacctactactcgtacaccgcagtcaggcatcttgggcccatgtccccagaaagccccctcctttctcgaagcccaacgcgcggaaagccagccagcgcccagcgagcccgtgagccagccgccaaggtcgccgttctcctcgcccaccacaaggccacaaccacaactctccaaccgttcgtctggccgaatgacatgtgggcctagggctcctcgaaccgcacgtcagttgggagcgccgcggatcccgcggcccggccgccacctttgccggttgctgctcgccgccgttcgaaatttgaatccccgcggaacacgatcgacgaaccggttcgtttgctcctccccacaccgtcgtggccgaaaaggacaacggctacctcctccaccacccccactacttcactggtccttccattttgtcgcttcccgtctcgcctcggcttcgtcttctcctcctccatatcccagtgccgaccgcggagtgcccccacacaaccaaagcggaagcttcggtcgagcagagcgcgtctcgtgttgcgcggcgccgatgggggcgtcggggaagtggatcaagtcgctggtggccatgaaggcgcccgagaaggcggcggggcataagggcggccgcaagtggcgtctgtggcggacctcgtccgccgcgtctagggccagcgccggcgagggcagtgcgctggcgtccgaggcttcttcggcgtcggcggactcgttcagttcggtcctcgccgccgtggtccgcgctccccccagggatttcctgctcatcaggcaggaatgggccgccgtccgcatccagaccgcattccgcgcgttcttggtatcgcccgatcttctcctctgtttccgtttggtgatgtgtcactgctacttccatgctgtgatcttgactctttatgcatctctgtgctcttctgctgcggcgcgcgtgagcaggcgagacgggcgttgaaggcgctgaggggcatcgtccggctgcaggcgctggtgcgcggccggctcgtgcgcaagcaactggccgtcacgctcaagtgcatgcacgcgctgctgcgggtgcaggaacgcgcccgggagcgccgagcgcgctcctccgccgacggccacggctcccagggccaggacgcgctcaacggccgtgccagttctatcaaagacgctatggtatattgaacacgcaaaacatcacgttttttttctggtttcagaatttgcaatgttcctatttcccaagggtggtggggtgggggaaattgcaatgttacaccaaaatggttgttgattattagctgctaagttccctacgaaacttccccagtagacagctaaatgtcatatgctattcaggaaaatttgagggaacaaccaaatttctgatgatggatttcggttgacacttgacagtgttgctggagtgtcataaggtctttggttccttagtatccactctgttccaaattataagtcactttggttttttagtacatccattttacttatatatgtagatacaataaatatgtctagatatatagcaaaatggatgaatcaaaaaagtcaaggcgacttataatttagacctgagggagtatcactaatggtgtcactgtcacatggaccatttgtttcagttccttggttggcttccactgagattttttacaaatttgttcaaaataaaggtagtttattatattaaaacttccctctaactttaattccaatttagtgtttcaaagctaatgattgcacactttgaaccttttttaagaaccaagatcattaggaagtcagaaactggtaaaagtttgaattttgaattcccattgtgttcctgttgatattttgactatttaaaactttccatgtgcttgttcttacactgaattccttgtgggaaactgacgtgagagttgatatggtgggttacttttatttgaaagggacttgtatcagtaagagtgacatggacaactaagcttcctttatcttttgtaatgattgagtccattaaggttgtttctcgctctttcacattgacaatgtgtgttagaatcaatattgtagtgatgctattaggtaagaaaagcctatggtgataacaccaataatgtcttttacaattaggtattgcaacccaacttccatgttcagactacagttgaacagaaataaaagataatgagttcacactacagtttgctgtttctattgatactgatcggccgctttcactagaatagtaatgtgagtatgtgacggtgcaaagatttcttggctgcttaatattttaggaacaatggtgtgaccaccaaggatctgttgatgatgtaagatcaaagttacacatgaagcatgaaggtgcagcaaagagagaaagggctattgcctatgctctgtctcaccaggtagtacaccacatctttgtcatcatgctacatccatagtttcatcttcataaacatgttgatcatatattcttttcagcctcggggttcaaaacacaagggaagaccaagctctcctgctagctgtgttagaagccatgagcctaatcacgacttgagttacttggaaggatggatggcgacaaagccatgggagaccagaatcatggaaggaaatcacaccgactcgcagcttgcgaagaactgcaaggagcagaacttgcctgcctccaagctttccgatgctagctcagtcaaaatcagaagaaacaatgtcacaaccagggtagcagcagcgaagccaccgcctccttcattgctgtcagcctcttcttctgactccgtgtgtgacgagagctctccatcgagatcatcggtgaccctgacgtctgctaccaacaccatcttagcatcagaagcaaggtcagacagtggcaacaacgccggaggaccgaactacatgagcttgaccaagtctgccaaagcgaggctgagtggctgcagcagcagccaccgagggtcgtcgttccagcggcaacggtccggggacatgtcaagggtggccctgtcttcaatcgacacccagagcaacgcaggctcggagatttcagtcacctccaggagactgaacagcatgtccctgaaaggcagccggagcatgccgagaagcttggacaaggagaatgacgtttgatcgatcgatcaatggacaaacaaatcctttataaccatatatatatatatttgctgcagatatcatcatcctagtttagtgtgagttgtgcacatccaatcgatgtccagatcctaattttcttcttgtctgtagtctaccgataaattatgtaagtacttattagcatgcaaagggcaattaccttgcgttctatttaagagtcgtgacggatgttgatagtatcttattttgggtcaccaaaaccctgaatataattctggaggctcatcttgtctgtttctggcgcgaaaccgtgtgtcctcttcgctgaagatcccatgacatgtctcgcgcgatcgtccgggcgatcaaacaattgctccgcacattccgattggctgccgcatatatgatggcctcatcagaatcggccccggcagacattgttacagggttggtagggaaccctgtaatggcgagggtcctcgacttgtttaatctctcgccatttgtttgac

SEQ ID NO: 4970 - DNA, 3706 bp, Sorghum bicolor
tgtgctgcttgctttgctcgaatcaaagaaaatccattaaatacaacatttctcaattgttttcttttgtcattgctgctctatctttatttgcgcccagctgacttttgtattcttatctctatatacatcgcatctacttcaaagatatgccgctgcgtgtgctgcttgccattatgttcttttacgagaaaagaaaaaaaaacaaaaaaaaactctatttcttaatggacttgataagatctatagtttcttcctctgtttgaaaattgtagagctctacatctacaaaaacttaggtccattgttgtatatcctacaaatcctgcagagaagctatatacatcaatacattgtcctatatcatcattagccttatcatgtgacgtaaccatggcacaagactccaaagctccatgcgatgtaccaaccaatagagtccaataccatatacaaagggcataagtcacctctgaattgtccaatagcatatacaaaggatagaagttatctctgaacagtgtccaataccatatacaaagggcagaagttacctctaaatagtgtccaataccatatacaaagagaaaaagttaacctactctctctgttccaaattgtaaagtcgttttgtattttctatgtgcatagattttactatacatctagatatacactatgtctaagtacatagcgaaaattatgaacttgaaaaatccaaaacgactacaacttgtaggcggagagagtagcatacaagaaacaagcagccgaaactggaggctatatatgccattcatcatttattgtttttcatcaagatcctttctcctcttcgtctctctaataaccatgaaacaaacctaaagaaaaggtaaaggtctccattggaatggaggaatggattatgtagaattggattaaaaaacaggaatgtttcctaatggaacatgttgaaaaaaaaacatttttcctccattgaatatttgaattggaggtttctaaagtgatctccaacattgtggttacgattgctttgagaagtccaatgcgcaatacgtttctctctgttttctcgtctagatatgaagctcttcaagcaaaaggagaaaattcctgtgtttgcttcgtaaaacatccaaatacctctgttttctctaaaagtaccttttttttttgcacaattcatacatttggaactttatacttctagattgttccaagggaggtccaggtagaaccccttttttagtatataaggaaggtaagcctgatgcacgctgccactctataaagtctagaaccaaacacatcatcatctttaaaatttgaaaataaaagaaaacaataaaagatgccagttgaactattgcatcagcctcacatagacaaaacaagttaccgtagaattcggaggcccctttaccatttgagtgcaggcaaaggcaaactgtcagttgctagttactaattcggagctgtgacactgctgaccctttgttgttgttgtcccccaacggcaagtgcccccacaagatgcctctctcctaccgaaaaaggaaacaaatttggccagcgctacacctcaagccgtctataaaagtcgcccatctgcacagccatccacagggaccatcctagctacccaccctgcactacgctgcagcagtcttcagaaattcgtcagtcactgcagatcggtgcaggcggcctgaacctgcatcaccaaaccaattcctcaatcaatctgctactgcgatttgcgaggcaggtcaggtactgacgtagtgcatgcctagcagctagctgaaagatgatcttgtttcttctgctattgtaacgactttgtaattgcaaatcgtctcacaatttgcactgacaacaagagttcaatttgtttgcacctgcaatcttgttgcagcagtaaacctgtaccaagtcttgttgcctgagttggctgtcggctccggcacgccggcggtgtcgtaggtgtatagatcatggaggacttcggcggctggagtatgcagtatgcagcagatccatgcctgccaagccgcccgagcgacgacgacggcctcctcggtgcctttctaggcggcggcttcgacctccgttctgaccatggcggtctcagcgacctgccctcgtcgcaccaggtccagaacctcatgccctgccacggcggcgcgagtctttccgtttccgacggattcatgggcctggacacggcggatatgctcgcgagcgtcaccggcgcactggacgacggcctccttgacacgttcgcttacggttcggacgtcgtcgccgccgccgccgaggagcccgcgcagcccaccgcgtcgagcaacgccttctcctccggatacagcagcaccacgggcggcaattacggcaacatctcctccggcgagtccaacacgtgcagcggcggcggcggaggccatgacacggaggttgcgtctccctgcgccctgtcgcggtcgtcggcgctgcctcaggcaacggccgcgctcgcctcgaagcgaaagctggggggcaagtaccctgcggtagccgcgaccacatcaacggaggcgcaggtcgctgccccgtggcgtggcgcaaagcgcgactcggcgacgtcgtcgtcgtcgaccagcatcacgttcgccgccgggcatggtgaccaccatgcggcaggaggatcgtcatcgtcggccggcggcgggtacgagtacgagccggactcggaggcgctagcgcaggtgaaggagatgatctaccgcgcggcggcgatgcggccggtgcaccagctcgtgtgcggggccggcaccgagccggcgccgtcgtcccagagcaagccgcggcgcaagaacgtgcggatctcgagtgacccgcagacggtggcggcgcggctgcggcgggagagggtgagcgagcgcctgcgcgtgctgcagcggctcgtgccgggaggtagccggatggacacggcgtccatgctcgacgaggcggccagctacctcaagttcctcaagacgcaggtcaaggcgctggagagggcgaaccctagcaatggtggctaccacaacagcagcttgctgccgcagagttacacggggacggggagcctcggtgtcggtggtggtggcaccggtgttgccaatggaagagatggcgccattgatggctacgtaaattccaacaggaacatgcacttgtagcgacgcatatatgtaaccatggatgtgtgagtgatttatatgagagaactactacagtactcctagattttgaggtctttaaagtcttcactttatttctgaggaataataatcaaaacgatttaatttcctctcctctctctctctctctctctctctctctctctctctctctctctctctctctctctctctctctctttttgatcggtgaaagatgcagtcgtgctgcagaaatgcttttagggatgcaaggcgtatttgcggcgggctcatggacaaaacctttatttgcacttttcacaacttcacatgcatgtgagttgtgaccatttatatatcatcctctttcgtcatcgggccttctagatacgcctgaaattctttagcatcgtgctcaatgttgagcacgaatcccaaaggcgagggttctgcactgacaatgttttccgttcacctatgatcttttgtattagtaggtttaatatggattataggat

SEQ ID NO: 4971 - DNA, 8214 bp, Sorghum bicolor
acaagattgaaggattgctaataatacctcgagctgattgctaataatgatgctctgtgcttgatcagcaactcccattcaattagttatggagtaatctccaatatgtgttagttaaaatgcgtaagttatatatgcataatggtgatcccaatttgataaattaatttatgcatactagtgccccccatctaataaatgatataagcctgttgttagtacttggtccattatttttgtgctttggagacttcaacttgctgttgctgatcttgtcatgcttgttctctcttgtttatcttctctctgtgtgatttgtttgttcatattgccatgtttgtcccattttcttatcacaagtttagtcagtgatgagaaggggaatatacatgctttctgcggaacttattatattgaaggatgtatttgacattgaactttactcgtatactggtaactgactgctggcattgttttgaaagaatgcttgtataaatagctggactcttcagcttagcgataccaaaccaagtttgaattatgagtttacaggagcctaataaatcaaagaattgataagaccaccttatgtcctgttcagtttccaacttctcattcagccaccaaagctcacaatgaactacctgtacattgggtgtaaaatactattgcacttcatatgttcaagaatggttttctaccagtccagacgaacaaaaaaaagttgttctgggaaaacaccaatctttgacagtgaacattgcatcatttttttagattacatgatcttttgtactcgctttcttcctctcttttaaagcgtagttcacttgcatcatcttgaatggtgcagaagatgcaagtcacttttctgaatgagaataaaaactctaaaagagactacttttttcaaacccttgatgtgatttgagagagtgagtttggatgcaaatgcttttttttaataaaaacttctggatgcaaatgtcttctcgtttaatctagaagaaccttgaaggtctagcacttatatagttattatgtttggatcttttccattcaaaaaaaagttatgtttggatcttcagaagatctttctatccacgtacacaattgttcgatttttttcctttgtactgtagttagcctcttttcttttatattaattaaaaaccggttcgacaaaaagaaaaacttagcacttttcgtacagtatcagactgttcattctatggtggaattaacttgcagtgacaagtcaccgcatgctcgcatttgatctcaggtctatgcaatacatatggtttttcttgtataatgtatatgtagaaagacctattagtttcgtaattggaaatgtacgtaatcaaaaaatggatgaaccaacaagaaacgtagttacgtagcagtaacggtttgcaattttgcccttgtttagatctgaattttttttagatttcgctacagtagaattttcgtttgtttgtggcaaatattgtccaattatagaataactaggatcaaaagattcgtctcgtgatttacaggtaaactgtgcaattagtttttatgttcgtctatatttaatgtttcatgcatgtgcctaaagattcgatgtgacgagaaatcttgaaaattttttggtttttagagcgaactaaacaattcattgggaaattgggccgcggtcaatgtcttttcagctggtcgaagccagagattgggctggcccactagacgccggcccgatccaaggcccaccaaagtcgctcgtccaaggaagtagtaacatctggacagcctcccagtcccagcacggcagcagggaagaagagtgacgagctgggtgaatccaggcagtccaccgtgacatcagcggcgggagatggcccggcgcagcggcgataggatccggctcgggtgtgcgcgacgggtcaggagcggagcgggggagaaggcatataaaaaatgcaaaggccttcgtcttcctcttcctcctcacctggcatccagagaggaaggggagggaggaactcggggacacagaggggcgtccggaatttcctctgcttccgtttaccgcgaaacctctgccttgaaggaagaatccgttcctctgcttgatctgtattcttctggaggagaagagaaggggaagcggaggaggattgatagagctggaaggtgaattgggcacagagacgcgcagtatttgaaggtactgctcttcccagtccgctaaactgcggctcctttgctcttttcctcgatcgttgctgcttgcagctgtaattttggcgcggatttgagtttggaggttcgcaccatggtccctttggattttgtgatttgtttgaattctcgacgtataaggttcttcatgggtggttgtttgatctgaacgatccgtccccccttttttttcttgttgggattggattctctcccactttcagctctcttcctgtgctcggattcctctggttctgtgattcggggatcccacatgaagtgcggggatatctcaagtggattgtttgaattcgattctccgggagctgcattccggcacgatttgaaccagttttccctgcgatcaagcgcaatctgagctgcttggcttgcgattcccgtgatttggagctggttgggagtttactgattcggatcgaacgatttgcctaacaatctctaccaattttcacttggtattcctttgttgttcggtcggagaaggaagcagagtctggagttgtttaggttggttgctggttgtggtttggatctcctccgttttcccctgttttttttttgtctggcgttctgtatcatatttgtgaagcctgcacatttcagtctttcccccttttacaaggaagttgttctcttccttgcttgattggtctttcttgttcttatcccaatctgttgtcgctctcaaaattccctttccatttgattgctgaattattgagaacgcaaaattgtgtataatacaccgtagagttcagatttcatttgattgattgattgcttgttttcttcgattttactgttgagctaatgagttaaattgagctcaattacatttttattccaattcgatctcttttagccttttttctgatctgacatgggttcaatcagaaaaccagcagctcaccatatgtgattagtcagttaaagtcgagttggattttagtggtcatcccgttttatctcaggatttgattggtcagtggaattactacccgtttccaaaatatacttttttggggggtaaaatcaaactgaaattcaatcagtctcctacctttcagtttctcctcctttgcagagaattaaagcagatgacttctcttctcttgagatttttttgaatggtctgatttgagctaaattttactaccatttcatccctttgtctacatggaatttcagctcgtcgcgaaatggagaaggaggggaggaaccactaccacacgcggggctcctcgcgcggcggcggtgggggcaccgctacggagcgcgacctgctgttacagtggggcaaccggaagcgccttcgctgcgtcaaggtgcagcgccgcgacgtcgaggccgccgccaccgcggctgccgagaaggcccagcgccgcgccgcggccgcagctgccgcagccgcccagcaccacccaaccggccacacccaccgccgtgttctcaggtctgtgcctctctctctctcctctctttctctctcttattattatttttattatatcgttcgttccttcgtggtgtcgatgtgcccattgcgtgtgctttgttttggtggctactcgttaaactactgcccattttgggctgttttgtaaagcaacaactggatatcacgtgatgtcgtcctgggcacgtgggtcgacaagaaaaggcagaggcctgatctagtttggttttgatttgaagagaaattcaatttgaatgaatggtggacaactggacatcaaattcgaagatgtggtctgtctttttcctgaagagctgaaaataccaaagttgctagttttctggtagaggagcccgcatgttaggcgaagcagtgttttttttttttttttttttttttttttttttttttttttgaaacatgattgcctcattgtcatgggttggcctatagtggtgattggtccagctttctcttcctctagagcatggagcagcgcatgcccagtactgcccaattcagttttgttggtttttatttacttgcatcgctaaaattgggcctgttttttttccccacaaaaaataaggcctggaaggctaaaagaagatagtgtttagagcagaaatcttgatagtagttacaacactgaaattagaagcttgtttggcttatctcctctccttttcattccaggtgagattgatgtctggagtttaaggaccaacaggctccttatctccatcttctccagctgaatatctgtatttggatccattctctaaattttcaagatttctagcttattcgccaatttgatttctgcatcacatgacttacctgaccttttgtttgtacagttttctcaaactgatttgtgatgttccttcactgaaactattgcaaaaaaagaactatgagactgctgtcaataatagcttatcagtattctcttaaaaagcgactcatcagcattacgataaatgttgatggctgagtgttctttgccttcatctattgctatctttggactctagtcacgtcatataaactatattttgttgactaattttggattctgaagaaaacaccaattttatcttgatcagtcaccaccacacgtataagtggatggtgagggcctgcttattcattgttcttccttttgcctccttgaattcatagcttgttgcctggacagcacgaagcgttgatataggcagtaggtggaagtttttgccttctatgttgcccctctcccctaaattggaggtgaatcatgaatttatgcagtctgcctatttcagaatttaatcatattttgaaataaattgcatgagggttaaaaatctagcatttaattttcatttttaaaatgaaaccatttgaacatccttttgccagaagattgaactgcagtatgtccctttttcatttaaaaatatcaaaattcatgcattctatgtttactggaaaactcaatgaatcaaatttgtagaaatatatcttgtatgcatatattttcccattatgtgaacaccttcagtgtgtgtcgcttccttctttttatcatgtttgttctttgctttgtcttacatatgacttagagcaacaagatgtttttgttggatagattaaactgataatcaggcattcttctctgcatcccttctaatctatgttgttactgattttgcaggaactcagaagagtttgcaatcatgaaatcgccagcacgccaacaacagaacaacaggatccacacggttgcttcaccagacagggagtgccctggtagaggtaacaacaacaatggagttccacagacctatccagatgacaagaaaggctcttcatcagggagtgaggggtccatctggccaaagtttgcaatcaccctttcaaacagggaaaaggaagaggatttcctggtgttcaaaggatccaaactgcctcaaagacccaagaaaagagccaaggtcatccagagaaccgtcaatgtatgaccctatcataatagcttctgatttgaagaaattattttctgttaaactgaatgcgatcaatccacatcaatgtgcatagggtattatgttgctgtccatggtaatactatctccataccaaaagaatacaattcttgcttcccatggagttaaacaattttaaatttgaccaaatttatacaaaaaaaccaaataactatcattacattaattatagaacatattttcatagtaaatctattggaagacataaatgttgatattattttctataaatttcgtcaaactgaagaaagtttgagttgtctcaaacctagaatcttttttctgagcacagagggattaggtaaatataccttgcttcacgcagagagattccaaactcataatatgcaaatgccagcagacagcagtactgtgcatgttcattaaaaaaatatactccaaactgtagggttactgctggaaaacataaatttgaccagtgttgtaatttttaactttgtttatgcactattattaatagatccagccatacagggcatcaggtcacatggaccatagacctgcctctgtgaactctgcctgatctgtcccctgaacactggagacctgcaaataaaatagcgctcggtgggtacctggacatttgatttgcttaccaagaagcacccatagcaccatagcatgcttctgtatgaagcaaataagttgatgcctcccatctggttgtcccctcaatgcttgatgagttgcacagttgcactgctggttcctactatcactgcaactgctcttatttgaaactgcagaacttcctactagcttgatgtcatcagagaatgtcacgattgttttattgattagctaatatgctactgctattgagccagagttgctttgctatatcaatttaattcacatctaatattttttttggcgaaaagaatatattagatatgaactgaactgatatattactcctatgtgatttgttttgaggtccaagcatccatggaactaaccttaagaacactctgtcttgtatttttatgtatctcttgagtttgcatatgagaaaaaccatcattctgtgattcttgcctaaatagtgttcatttgcagtttgtatgcccaggaacgtggctatgtgacttgactctcgaaaggtatgaagtccgggagaagaaggtttccaagaaggtgggtggattgtggaatgtcgacatctatcaatttcatactcttggaggaattcattcagtcagctgacatttgaactgattttgcagcgccctaggggattgaaagctatgcatgacatggatagtgactcggaataaagaagaaaagagcactgaacatgagaagctgaatattagaaagaaggccaggacagatccagcatatggaggtcgatgataaagcatcctgattgaatgaatggcctgatcaacaggtcaccatttctcacgattgctactggagatcaatttgttccaaaaggactagcttgtggagatcggaggacaaaccaaatgtaaggaactgcacagaagaaaaagagaggagagaagcaggagctggaattcctgaacattagcaaaccattcagttccctgtaaagcagcaacgctgttttgcaaagcctctcatgttaatttcgcactgccaaatatcaacgtgatcgcgaagctagccagtcctggcgcgtctagtttgccgggttatctgacaataaaaattaatgtgaatctgaaagggccttccatagtttctttttttctcatggtgctgtataaaggttcagtgtacattcattcaggagcatgagactgtccagcactccagtgtgagtggatcaggattcaggcaacacaaatgattgcacctctttgtgtaattcaggacagacagacttgtaaattttgaaagtttcagtagtttttatacagacctaccctctccgtcctagaaaatagaaaaaattcctattaacactagaaacttgtcttttcttatttacccccctttcagtttttctttcctatctgacactcccgttactttagagttgtaacggtgtcaagtttcagacgaaaatatagttctgcctttgttttttttttttgtgttcctttttgcttgctaaagagaaacatgacagtgggaaataaaaaggccaaaaaacaacaatagctagtaaaagggaacgccacgactagaaaaaaaaaacaacagaggtaagcagtcttttctttggggacttgaaaatttaaatcattgaagtgtcaagtttgggtgccaaataaaagtagaagttttcttagtgttagatagaaaaaaaatcctaagaaaaagtgcaattgtaagtttaggataagtcaaattttcttaagtttatctaagattttgacacgtactttaatttggatttgatatttaacatatactaacaagatttaaaagatccgtctcataaattatagacaaattata

SEQ ID NO: 4972 - DNA, 4637 bp, Sorghum bicolor
tgaacctttggaattatctatttggggaaaagttagcaacctgctattggtttttattctgccaaactatttcaactaaccttataatgtgcaatttcaggtctctttcttccagcagttgtccggccaatcctggattcatgggagaccgcagagaaagttcctccaccacctctaaatgatgtatgtaatttactgcgattcaatttgtttttggttgttttatgcgtgttattttcaagatcatataaacgataaacattgcttccactcaatatatgtcatcatttcctaattcagaatgtttatttccttagcaaataaatttcctattcatcttcagttactccctataatctggtcacttcaaactaacctgtctgaaaaaagtcccataaatgagctctaaatgtgctggtagctcagagtaaattgtcgagggcatttattgttactttgtgttgcataattgcatccttgtgttgctaacttggggacttgccattatgttgatctccttttgaacaatgaaaccaaaagtatttccctcaggcggttagatgctgttatcgtgtgattgaaaatgggtgagacaaggtttaaatcttttgttacttttgcaggtggttgcaggtgtcaccggcaagaaaaagtagtgaacttgcattgttttcttatgtcaatgttgtgccacatttcttccccatgttttctggcgaccagattggaaggatctcccagtcatggtcttcaactctagatggcgaccagattggaaggatctcccagtcatggtcttcaactctagatggtgtccgcggaataatcattgtacctgaatcatgtactgcagtgtgacagttttggaaaatttttctcctacaaaggttgatagaatgtcatcaatatcttttgaactgtgtttatcagttcgttgttaccatatttctcgagaaaaatatacattcagaaagtattgttggctgatttgttgtgagagaaaaatactactaaggccttgtttagttcacctcaaaaaccgaaaagtttttaaaagatttttcgtcacatcgaatctttcggcatatgcatgaaacattaaatatagacgaaaataaaaataaattgcacagtttacctgtaaattgtgagacaaatcttttgatcctaagttacagtagtttaatctaaaatcttttagcatctaaacaaggcctaaatgactggcagcttcggctgataagcttaagcgaagtgtctattctctccgtgatgagctgcaggaccaggcgcttgcgcttatagtcttgcaattgtttggttgaacttagggcctgtttagattgggaacgaaaattttttaggtgtcacatcggatatgtcggaaggatgtcgggagagatttttagaaactaataaaaaaacaaattacatagcttgtcaggaaacttcaagacaaatttattaagtataattaatcaatcattagcatatgtgggttactgtagcacttaaggctaatcatggagtaactaggcttaaaagattcgtctcgcgattctcaactaaactgtgtaattagtttatttttttatctatatttaatgtttcatgtatgtgtctaaagattcgatgggatggatgaaaaatttttgggtggggaactaaacagggccttattagctgaattatcagccaaacgagaagtgtaagctgatgtcacgttgaccgcgcttctggctccatggtgcttgcgcatcccacctgacgtctccgacctcggcgagtcgtcggcaatcctgtgcccatgcggtcatgccgcgcggcactggtgctgtagaatagtgaacagtagtagaagattggcacgtcagcaacggcgagtgcgagacccgggcacccggcgtgcgggcatgtgctgtgggagaatcgggcgcgcacgagagggggcgcaggtgcttttgggccggtgcttcgacccgtgcagcccaactaagcccatgaagcgcctgctagaaattagggtttacgagcacgcccccggtataaaataggcgaggctccgagccgcttggcctcccgcagccgccatcccaaccccggaacagagcaacgcgacgccgcggcacctcatctccggtaagtgagatcgcttctctcacggcatgcgacgatgatttgttaggtccggtagcgtgttctcggctgtatttcgtggtaaagtttgggcgattccacttgatgctgatttagcggtcatcaccgtgcttagtacaccaccaatccaagtgtttgtatgattcggctggtgttttgtggggcttagtgtatacatgatgattcgtcgttgtttaggttgctgtagtctcctcgcatcttattttgcacttgttctgtgttaaggttggcctaaatctattcttcgctcaattagatctggtagagacatgtgcgtagggctatccgtcttagaaatactcggtcaaatgttcagctctagctaaaaactgcctatagcttcctcttgcaatcctatgtcttatgcatatggtcagatgattatttttctccttgtctaatgttgctagggaatctcacatttggcagttcatattgattgtttaggcgaagggaaatggcaaccgttcctggggatctgatctggcaggttgtgaggaagaacaactccttccttgtgaagcagtttggcaacggcaatgctaaggtgcagttcaccaaggagcccaacaacctctacaacgtccactcctacaaacactctggtatgatgcttcctttgaagtttctggatgtcctgcatacataacacattgtgattctagtaatataaataataaattacttttttgctgactcctttggctgttttgttctgttaggcttggcgaacaagaagactgtgactatccagccagctgctggaaaggactcggctgtggtcctctcaactaccaagaccaagaagcagaacacacctgctaagctcagtcacaagtctgtgatgcgcaaggagttccgcaagatggctaaggccgtgaaaaatcaggtactagcacatggaaatgcatatgcttgtctctacggtaattggcagtactcgtcatgctatacatggcaacacacaactctttgttttatgtattggatattattttcacactttgttattataataatctgttgctgtgatgagccataacaaataagaagaccaactgatcaactggttcttcgatgaaatataagctgatacgcttggcttctgagctgcattctggatatagaggtttcatgttcctttttatttagcattgttttttaaaataacgtgtttgtttgaaagattgttatttgtgatgttggtttatatggtgtcgtgagtttttgttggtagctaaattatctttatatgatttggttccatagctagtccaaggtttagctgtgatgagccataacttgtgagagaaccaaccgatcaattggttcttcgatgaaatataagctgatacacttggcttctgagctgatcttgcaggttacacaagtcttgtatgattgaggcccgtttttttcccctttagagaagttttgctaataatactcgctcagtttttatttacactaggattgccgatcctgtttgaacttgctggtataccatataattgctgaatattctaatttgcattttgttcaccatgcaggttagcgacaactactacaggcctgatctgaccaagccggctcttgctaggctgagctcagtgtaccgcagcctccaggttgccaagtctggtgtcaagaagaagaacaggcagcccaagcactaagcttgttctgtcaaggggctgttggtgctcatagtcccagcttatgtttatctatgttccaacagttttgagacttgaagtgagacttgctagaactagaacaaaccatgttaagatgctgccgtgtgtcatttcataacaaaaaattgcttggctcttgattactgctttgttgccgtgtcattgcatgtcaaaaattgcttggcacttgattgctgctttgtttgcaaacttttgctggttgtgattagcctccctgttattggattctgtttcgttcctgaaactggatagtcgggtgcttttttttttatgtttgtctagcctattgtggctttgcatccccatttgactaagccctccaattgcttcatcgagttgtgtactgtttaaaatgtgtatggcagagtttgccgcccgtgctaccccttttgcgtagcaggccttgccacgttgttcggtcgacctagggcagaaccgttggcttggacgccaaaccgagcatcgtagcagaaacgatagcaagagtttttttttgagtggatagccagagttcttgcttggaaatgatttgttacggccaaccattgtcagccgagctgttagacgtcgctaccattagttttagccggctgtagtgtaaaggtcgttgatcgttaattcctggcgggtccttccgcgcatgaccgttagctggggtagctaaaattcaaatcatgccatcttctacagaaactctgcgaaagtgttcatatcaagcacttcaggttcagcacactagat

SEQ ID NO: 4973 - DNA, 2677 bp, Sorghum bicolor
gccgccgccgccgcccgaagaagtttccctacaagccaaagcccccgccggagccgcaccctttcctcctccacctcaagtcccttccttcgcccgtggccgccgcggcctcgctcctctccgcgccgcgccacctgcacgaccaccctttcgcggcgtgcgtgctgtaccgcctcgcgcgcgcgcggctcttcccgctcgtcccgccgctcctcaccgcgctccgcaccctccgcgtcccgctgcagcccaccgcgtttgccgccctcatcgaccacctcggcgccttctcccggcccgacgccgcgctactcgtcttccgcgccgtcccggccttctgctcccactccaacgccacgttccacgccctcctccactccctcgtctgcaacggccgtgtggacgccgcgcgggacatgctcccggaggcccctaagctcggcgtccggaccaacgccgtctcctacaacatcattctcaagggcgtttgccaccgggacgggttctcgggcgcccgcgtggtgctcgacgaaatgctcgcccgcggcctgcgccccacggtggtgacgttcaatacgctggtcgggtcggcgtgccgggaaggggaactggccgcggcggagcagctcatggacgagatggcgcgccggagtgtgccaccgaacgccgtgacgtacgccctgttaatgcaggggctctgtgacgccgggcggtacgatgacgccaagaagctcttgtttgacatggagtaccgagactgccagcccgatgtgacgaactacggcgtgctgatgagcgcgtgcgcggcatgcggggatgccggcggcattaggggtctgatctccgacatgcgcaagcggaagctgacacctgacgacgcgagctacaacgtcctgatcaagtgcctctgtgacgccggcaaggtcgacgaggcacatagggcgctggtcgagatgcagctcaaggatggcaccgtgccgagcgcggccacctaccgcgtcctcctcgacgggtgctgcgaagcgcgcgacttcgacctgggtctgcgggttttcaacgctatgctggcgagcggccactgccctctggctctcacgttcagacgcctggtgagagggctcggcgaggacggcaaggcagaggaggcctgctttgtcttggagcagatggggcagagggggatgcggctggatgcacaagggtggcagtctgttgctgcatgcgtttgcagcagcagcagcgcaactgagatgaacctcatcaatcacctggtgtcatcaccatcttgatactcagttcgagcgtcattgttttgttgtatttgattttgataatcctcagaaggcagccactgaatgttagaatctatcttagtctaagacatcatctccctttttgacccaggatcttgtttagtacttcaagacggtaaattagtaattattaccaaagtgaaagattaccagcttgctcacttgagcatatcagccaaatctgtcagctattctagctttcaaacgacgcagctgtgctgcataacctaaagtcctaaacggtttgtgtcagcaaacgcaatatccaaaccattttctaaataatgccctctgcagttcactctgaagtgcaaacagagagaaattgaagcggttgatcaatgagacatttctcagggaattaggggcaaagatgtacaagagattttttttacaaaaagttttatatattaagtcaatagaattcgtgtacaagccaaatcctagctattccttatacagatttcccaatacaataagcgactgcacagccaacaagtgctcctgcaaaaacctgcagtgacaaaagaaagagaatgaaaacaatctaaggtaagaaatagaagaaatgcagaaacatataacgataatgcatcaactaacaattcaacagttgtattaagatatacatgcatctaaaaatactagccatgggccaagaaccccaaaattgttttcttggtcagcatgaaatgttccagattatattctggaatacaaggcacagttaagaagacacatttgacctgcaatgcaacatttattatcgtttggccatttgctatgcagaggcaacagtataatacaaacgggcaccaaatcaaagatgggtcattccaccaccaagcttcatttcaagaatagaactcaacaagtaccatattaactatgtaaggaatagatgtagggatgcaaatggggtttatactcgaacccacaaataggccactttaagcggacggtttgcggaccacttgcatccatcaatagaagataggagtatgaagtagagctacctgaagtgggctgtgtccaagaggttcccgtagtggcctaaaggttgaaatgattggatgttctggtgggaaatcacagactatttgattcaacaactgcaataaaagtaattagacttaattagaagacaggcacagatagataaagtggcgacattcaactaacaacactgtgcaatagaacagtgccatatgcttgcattatccatggaaaatcacaagcttaccgcagcttggcgacctgtgtgccatctaattcctgatgcatcatacattacctatatgaagaaaatttaaggttaggacatttttaaaaactaataaaaaaaaaggcagcttacatttttt

SEQ ID NO: 4974 - DNA, 10250 bp, Sorghum bicolor
tacaggatatgtgtatacaaggatccgggacaagaaatcattccatggatacctgaagccatagatatatagtacatatagttgtcatggcatggctttgatttacattattccgaggaaatgagaacgtgattgacaaatccacactttcatgtctatgaccagttttttttccttaagagatgaccaaaactatttctcccctaatcatcaaacaaacttagcaaaccacagaaacaatatctactacgcgctactatctatctggctataatgtgaagaacttaggtgtgcatacaatcctgaaacctctaaacaaggacaccatcaggatttcattccaagcacagcaatatctgacaagggctattttattctcctttgactctggaaattacaccatttgaagcagaacaggcatgaaccgcatgaacagacccatgcatgcgcggtgtgcatggcagttaaaaatggttttttcccccctcgtattcgattattctttgcaattgcaaggacactagttacatttgacctcgataaacaacggcctcgtccacgccctgcccaagtgcccatgttatatgcgagtcgcttcacgatgagagagattctattccaccgacctgcatagactacgaacagttgagagcagaccgaatctgctacttatatgacaacgaaaaaactggcgcgcagtgagtgtgtgtttgggcattgtcgctgggctccccagcctgtaaggcccatgatgaaaacccaagtcacaaagaggccttgctggacagcccattgggtacttaagttgttgggctacctgcaagtaactgggacgtctgaacagatataaaaaaaaaactgggacgtctgaaccatgattacccactccagttacttcatttgttcaagcctttctcccctcagaagcctttcaagatttgagtattttgaccacctttttttttgaatatttgacactatcacaatgacatgtggagtcaatctaagtcattgacatgtgggttagagtgccaaatcttaaagactcacgaattggatgttagcttcaaaattttctctcctaaaagaacattttgctatgaaataaaacattttctagtctatattcctaatatgacctatacttatatcaggcacaactcctgctgcttcaaaagaagagaagaattgacgtgtccatgtcttataggggagccagagaatgagaggccgagatcgagcagatcctagccactagctcacggaagaaaccgatgcttccactccacgtctatctccgtatagccacaaattgtggcctcttcgtttttgtatttttgtcacataaataaacctagataaatatcttcttaccgagtactgtagttgttagttatactgcctccgttttctaagtgtcacattcttatagtctggcaatatataaattatatattgaatagtatttctcataataaatctaaaaatataaaccttatgatatgaaataatataaactttttgaaatcaatggtagaaaatacacatgtttaacttaggacaaactaaatatttagaaaaaaacgaagggagtatattccaacatgcactatttagggagtactctactcattgtgaaaggtcacaactcacacgtcaaacatacaacatgcacgttttgcttattttttttttctcaagtctagctatactgaatgatttcagaaacagaaaaaagtcatggcgtaaatcaaaatttaaactctattgatttcatctccgctgaagtctggggcttaataacggatcaaaatgcgaaatccagcagcaagctcggagcccgcacgccgtgtcacatgcattttgagccactaacatgtggaccctctgccacgtgtcaaactcttccgggccacacgctttgaattgaatgaaattatctgcgaacgataattcaaactcacggggaaataaatagcgcgagccgcatttcttcaaccaggaaaaaatcgggaaaaatccgaaatggccgctagtggcctcggcctctccacctcgttcctccccggccacgacaccctcctccggcgccggcgccggcggccggcgagcccctccaccgcgtcgttccggccggtgacggcggagctcggcggcgtcgcggcggggctgggccggcagctggtggaggcggtgggcgtggggctcccctgcaccgtcatgcagtgcggcgacgtcatctaccgcagcacgctcccccagaacgatgggctcaccatcacggcccccggcgtcgcgctcgcgctcgccgccgtgtcgtacctctgggccacgcccggcgtcgcgccggggttcttcgacatgttcgtcctcgccttcgccgagcgcctcttccgccctaccttccgcaaggtgggttttcgcgcttgaaattccgaatcctaggtcctctatcgccaccgttttgtgctgatatggtgctgcttcggcaggatgacttcgtgctcgggaagaagcttggggagggcgcattcggggtcgtgtataaggcgtcactggcgaaccccgaagcggctaagaaggtaaagcctaatgttgcatccgcatgtaaatattcagttatgtagaacttcggttgctaatcgactcaatactttctgctttgcttagacaacaaagtcggtagtcctgagagaaattagagaaaaaaaaacatggatatacgtttaatattgtgaccacacgagctaagtagctaactgtgcactacgtggttgttgttaatatatgtgaatcagtttcatagtttattgacaacgttggatttgatgacttcatgatatctagaaccctggtcatttttgtgaacaaacggtcatacgaatgggcatctaaattcttttgttcatctttgaagcaaggggatgtggtcgtgaagaaggcaacagagtatggagcagtggagatttggatgaatgaacgtgtcaggagggcatgtgccagtagttgtgcggattttctttatggctttcgcgaggtatactcacagtcacaattcgtttgtgttggatgattgttgttgtttttttctcccagtccctttctctcaacaaaggataagtccaaaatggtcttagatttatatttactagaatttggttgattcctgaggcattgcatgttgccttttagaccaaaacaaagggtaagggagctgaagaatactggattatttggcgttttgaaggcgaggatacactttatgatctcatgcaaagcaaggaattcccttacaatgtaagttctgccatccaccttgaaaaagtcttgagtcagtccagttactttggttgcttaaacttcagctgaaccagctttttttctcatgtttgttgcgttagttacttgtttgaatgaactgtggctgatttaactgatgattgccaccttgatgctgaaatcttctcaggtgtactttatgtctaccttgcactgtgttgacttgcttacctgtactagaatgatcaagctgattaatcagttccagtgaactttagcgtgataagtatgatcctttagcttattagacattagcctcagtttgtgatccacagttagtgagagtagttaggcatgtttttatttcgttttcttttttggttaagaatagtcaggcatgtcttattgtcttcctttagttaagttagcattatcactttatggaaaattgcaatatttcatacttatctattgcggagagataagttaaaccttccatttgatgcattctaacttttgagtcaaccaagcagtcatcacaaatttacagtggcatggagtagctgttatagacttaaacagctctgactcgattttttttgccaattaggtggagacaaaaattcttggcaatgtccaggacttgccaaaaggtatagcgagagagaataagatcattcaaacggtgatgagacaactcttgtttgctcttgatggacttcattcgacagggattgttcacagagatataaaacctcaaaatgtgatattttcagagggtaataaaaggatctcagtttgtttgcaatttcatgataaaatattttgcattgatttgcaaatgtttctctctggtaggatcacgaaccttcaaaattattgatcttggagcagcagctgacttacgggtaggaattaactatattcctaaagagttccttttggatccaaggtactgatggctaccttcattgtcaataagtgcataacatggcaacatcaaagaaaattctccactagtcaaacattttaccttgcaaagctgtttgtgctaatggtttcactagaaagagttgttgaagctataaaattacctggcaggtatgctgcaccagagcaatatattatgagcacgcaaaccccatctgctccttctgttccagttgcaacaactttgtctccagtcctgtggcaggtttccttcgaactgatttttcttttcatgtttttgagataattgttccaataaggataatttcttaagcttatacagtgatatttttcgttgacagctgaatcttcctgacagattcgacatatatagcttggggctcatattcttgcagatggtgagtgattacagggaatagcatatatttgtaggtatctgcaaaacagatgtgttggcacagttatgtattaaaaaatagtagaggcacagttgtgtatcaaagatcagtatgagtatacattgaatgctaggcgcagcagcggcactggtatatcttagagcacacgaccacaaaatctgaaaaggtctaaaactggtattttccaatctccacatgccgcgatgatttttttcttgttcatggttcgaatcccatcatagtgctgatcttccctctacaactgctgcttggataggctcttctactctgttcgtctcttcaaaacaccatccaatttttggctagcagtgcatgtgcttgcagtgactgttgtattagctatcactgacttgcaagatggttgcatttgctcatctgatcattatgatttatgagcacacatatttattaacgtatgcgatcatcgttatattttattgaaatgagaactattttttgctgcaacagtacatgaggctgtggcaccatgctatattaccttttttttttgatggtcaacgggggggaggcgatccccacctgtgaaaaattttattttagcccaaaccggctcgcgaaatgtaagagttacaatgcaacctcgtgttgccttggctacttttacaaccagagagagaggagaggagagaggaggacagacaaccgagagtggtatgagccctctgctaactaactttctccagattctaggaaagacctgctctagccatttgtagaatggagcaccaatgatcagcaacaatccttttcctcaacggaaatctgtacttccacaacagggtggtggatatgcattcctggagcacatgatctgccgttttagattcattcctgaagatctttgcatttcttgccttccaaatatgccagcaaaccaatgccagaaaggatgggaactctggaaactggtcgcccgagggccctcggactgtatgcagttcgctcatatccactgagattatggactggaggttcatgcttgcccagacatttcggccgagagcacagccatggatgatatgttctggggtctcatcggtggcgctgcagatttcacaggttgcagagtcaacaatgcgtttcctccaaagcgccgaacgactctgaattctcccctgtgttagtagccacaggaacagcttcacccttggcggagctaggttttcccaaatgaaggctgcccttggactgcctccctggcctcttgctttgatcaacttgtaaagtgcaccgctgtctaggctgttgtctggcctgatgaaaggcgagcatctcttgtcgtgcgcttcagatagagcagtttgttcaatgaccgggagcagttgctgtagctctgtttgtgctgctgttgatagtcgaggcacgagtgtacgaagtaaaccagaggttttgatctcccataaagtggcctgtttgaaggagcagtgggacaagagagctgggaacctctcagccagggcttcatcctcatcatcccagacatcgtaccagaacgacgtgcatctcccatcgccgatctgaacagtggtgatagcttggtaaaggggagcgatggaccgcaaggtctgccagtgatctccatgcagttctccagttagagtcgtaatcgatgctcgtctttgcacccacgcagcccatgcagatgattgggggcagtgcagccggtgtagcagtttcaggagtagacaaatgttttgcacccctaggtccctgacgcccagaccaccacactcccgggggttgcaaacgcttgtccagacaaccagacagttggccggggaagcaacacctgccttatccccagaccagaggaaagctctccttaacttgtccatggtgtgcattgcagaggccggcagctgaagcgaactcatcaggtagacaaggattgagtcgagcaccgagtttaccaaaactaaccttcccattgggttaagcaggtcagcctgccaagatccaaggaacttgtcagtcctttgaatgtacatgttgaatgcagataccggaagcttgcttgccgatagtggaaggcccaggtattgctgcggaaaggagccctgactgcagcccagaacctgtacacactgctgtatcagatcagcatttgcatgaattgggaccaaggtactcttgtcgaagttgatgtgtagtccggacatagctgcgaattggtccagaatctccttcagcttgactgctgccgaggtttcagctctgaagacaatcaaagtatcgtcagcgtactgtaaaactgcacaaggtaggctgtcttctgttgggtgtctgatttcatttgccttagtgatcagacgttgtagtgtctccgcaaccagcagaaacagatacggggacagagggtcaccctgccttagacctcttttgcagtttatccacggcccaggacagccattcactagtactgctgatttagaagaagacagtaggctgtgcatccagtcgagccatctctgatggaagccccttgctcggagaactgaatccagcccggtccagttgacggtgtcaaaggcctttgcaaagtcaagcttcagcacaattgttggccttttcctcttgtgacaagtctgaacaagttcaactgcatatacaaaggtgtcagagatcgatcttcctctgacgaagccggtctgatggatgtcgatgagttttggaatctcaagctgcagcctcgttgttagggctttagttaagatcttcagagcacagttttggaggcatattggtctgaaggcgtccacgtcaattgcatctggctttttcggcagcagtaccatgtgtgagcggttgataagatccagatcagcaaccccctggtggaaagcctcggcaaaggccaggatttgtgttctaactgtctgccatgcaatcctgaaaaaagccggtccgaatccatccggcctcggagcacttagctggttcatttgacagactgcttgcttaagttcagtttcagagaatcgcctcgtcagctgacaccctggcctttgggttcctgcatagagtgactgcaggtccatctcgacggcttgacccggaacaccgatgatggacttgaagtaggtcgatagggcctgcgttttcccggcatggctgacgatctcttgtccatccacctttaccatcctgatgtacttccggcgcatacgtttagttgcatgggcgtgatggtaaacggtgtttgcatcactttccttgatcgctttctgtttgcttcgcaggcgccagtatgcagcccttgctttggtttgctcttgcaaccggtcttgggcttgacgtcgcacctgaaactcactggtggacaagtttcttgtttcctcaaagtaatcgaacactgaatttgcagttttgtaggatttgaggtggcgccctgtttcgccgtttccaaacctttgccgcggaccgggtggccttgatgcaggggacttgtgttttctcttcatccaacctccttttctagctctagcaatatacactttgtcctcgccttcttaatgtatgtggagtattgctctgcagctagctacatctccacactctggttcagcaagcatcacctgtatatatcgtggagtgaaatcagatttttacactgtcatttcaatcctgttttttttaccatggtgttgtaagatgcagatttgcaataaaatctgcttgaaggatcttattgttttgtctcttcccaattccagacatgcagtggctgagtggcagcatctttctatggaattacattggatatctttaagttgttgtaatatctttattaacaggacattggtttcttttgtaggcattcccttcactacgaactgacagcagcctcatacaatttaatcgccaactgaagagatgcgactatgacttacaagcctggaggaatctggtggagccacgagcgactgctgagcttcggaggggctttgacatcatggatctagacaatggtatcggatgggaactcctcacgtcgatggtccggtacaaagcacggcaaaggaccagtgctgagggtgcattggcacacccatactttaaccgtgaggggctccttggcctctctgtcatgcaaaacgcacgactgcaactgttccgggcaacccagaaggactacagtgaagccgctcggtgggttatcggcctcatggcaaggtcaggaactgaagaagtgggaggctttacagaagcacagcttcaagagcttagggtacgtatgacagccttacaaaaccttttgaggcagtatgattgcatactaaccagtagtttctaacacggtaacacaaaggcttgaaaaatacgtactggagttgttgctttgttccagcagttcttagacaaaaaaactgaagcttttcctttgaaatcactaatcttacataaaacacaagatttgaaataccaagagctgtagaagcagttagaagaccagcagcatttcatttcgttttctgcatgctctgactccagggataaatcataaaacgtatgatctgtcaggagaagaccgaagactcacggcttgtgtgtttgctttttctctgtgtttcgtgtaggaaataaaaccgaagaaaggcaacgcccagcggaacgtgcttgcctccgtgctgcgcctgcagaagaagatcgtgaaaacgatcaacgagagcatggacgagctcgccagccagcgcaaaagcatctggtggagccggtggatacccagggaggagtaggccgccggccgccggcgcacctgtacattgtccacttttgctgtataaaacgtcgcccagtagcactggtgatggtatactacactatcctacggtacttcgtacagtacatgctgatgactggtgagtaaagtttgtctgaaaagatcggagtaacacggtgtatagctgtaaatatttgctattgaagcatcatgatttttgagatccctgtcctaagttcgtaggcactttcatcaaaaagtaggaggttagttcatcataagcactcagctctgctctgcctgaatatcctgtgattggaggttgccgaagctttctgcactggaataagagcctccctcgtgtgatcgtgtcatatgtggtgtataagattccatgacaggtcatcatttgtgccgtggcgccatgattgggacagcgatcttttgaactgtggcaaacactacagctcgtgatggctgattaatgaagtttatggggcagttggttggagttggtcagttgggtgacttgggagaagtctttgaactgtaccatttggccggcctttcctttctgttgttgcattgtcattgcattttacccaagtggtccttcgtggaccacggtcctcgtctttgccagtttcccagggtgccaacgactgacttggctgggagctgcatttacgtatctgagtactatggccttatttatcagatggtagtttaccggtggatcacattgatctgaggccacggcacgcgggtagtgagaataatccccaacttgaacattttgcatgcctgttctctgaaggttcttgaattgtgagcaacgt

SEQ ID NO: 4975 - DNA, 2770 bp, Sorghum bicolor
aggttcggtggagcagaggagcatcgctgctagacgagtacgacggtgaccgagtggtgacaagacagcctcatggggctagctcgggtctggctctactcaacgtctgaatcatcgttaagtctggcctggctccagcagtatggatggccggacttagctccaaaacccactcctaatcttgattttttagcaatataaaaaaactgctctctaacaattctatctcaactctcaatcttttcgcacatggaagaattgatccagtcacgggaaatatatgtgcatattcactgagctagtttggaggtggaaacaagtggaaaaaaatatagagtagagcgggttttcaatgcaaatatacaagagagaaagaaagtataaaagcaattaggatgatttggatatagttcaagatttccgatacaaaattgtcttctacatattttaggagtgagattttgaaaattattggcccaacaaatgtgctcccaacatttttagccacttgaaaaaactcattagtttacttattgttttttaactattggagatgctctaagcaataaaagaagtacaagaaaccaaaaacacaatgtgtgaaacacagctctgcattggcgtggacttaaaagaatgaccgacctttcaaaaaaaagaatgactataaaaaggtatcttgtgatattaccgaacaatcaaggtcttacttgacacgacttcttcatcagtttcagaagccgtttgaagttgtttctgctaaacggaataaaataaaacagcttcacctaggaagtctcttaaatcgtgctttcacagaggtttgaggtgggatgaaatcaaaaatagtggcttcaccttgtcctagtgggccctgcatggggttgtgtgagagagcatgttaatttaaaagagctctatatgtggagctttttggtcaaatggtttatcaaaatggcttcaacttcaccaattaatggagctattcattgagccgaagttaaaaaaatggcttccctggttaagtgaagtcgtgacaaatgggtagtaaatctcataaacaaaatttgtttagagagatagatctaaataagactggataaccttctagttagcaggggtggaatccttttgattcaagggcactcaactgaacatataccatttttaaaaagaaacctctatgttaataataggattaaatggtatattgatgtaggctagaagatgacaacaaagtatttttcacatagcaaagcacgaatccaattatatgtatgcataaatagctcaaaaaacagtgcaacatcaatgatttcccccctcttttttttgttatatatatatgcctccaagtttgaacacgcccattgttccaatcctaggtctgcctagttattagttaaagtctcctgacaagtctgtcttcaatttcgattaaaagatggaggtgactatctggtttccttagaatgatatgatgctgcacgtgcatgcctcccgacgaccctgtggtttgtggagatggagtagcagccttcaactccttaagtactgtgtttagctccgaattactactatatagtactcttttcctactcgatgcacattcagagtttggatttcaaattttaccgagagatgtcatgatctttttcttgatcttctggggtgttcgtgctcccatcatcaaagccctgcatttgcattcggcagcccgcgctgcctgccacctccaagaagaacgccatgttggttcgactcataagctataataaaaaatattatttgataatttgttgggagagaaaaacactactagaatacgcaagggctagggcgggcacaacagcacagctattcagctaactaacgagacattggcatggtcgcatggaaggcccaaggcagaggcaatgacgtgagcccttcctggtttcctgcccctcggtcgctatataaccctaccagacgcgctggattgagcacaccacagcagcggccgagatgcagatccagcggtagcgcgtcgtcggcgggagccttggtgctcggttcctcaccctccgtgcctctgttcattacctcgccgccgccgtcaggccggccgggaccgggacgatgaacaagccgaggagtgggagtggccaacaggggaagcgcagggtaggaggaggaggcggcggcggactcggcggggcgctgaggaagcagatggccaggctctgcatcatccgggagtgcgtcatcatgctcctcttctaccatgactgatccagtcccatccactgatgccctttgcggttcttcctggccattgactacctttttctttcttttttttcttttttttttccccctcgttcattgatcatatcccttgatgtgcctcatgtatgtacatatagggtggttgttcttgttcacatctgtatctccatcatcttttaacacttgtttgtggtgtgttgttgattttactcctaagtccgacaatggcaaggatgtaccgcgaaatgttggcatgtatgtatcctttttgttcatttgctcagctttataagaaatgcgaaaacagaagaaaaaaattgcctgtgttctatcttttggcctacttgttctgttcattcatgcagctgttccgagtcatccagcgcatttccacgttagaagccattgagcgcatgatgtctaaccaacgattttcgtagaccagagaaggccattgtatacactcatacgccttcttaataatgaaataacacgcagt

SEQ ID NO: 4976 - DNA, 6430 bp, Sorghum bicolor
tgctcagtgctatactagtgtgggtgttgatctttatcttgtgtcctttatagttgtataaatcacagtttatataaactcacaaattcctccattttgaatgtagcaagcttttaccatgaaggagattgatccggaaagcttctgacgacgattttgagtagtttagtttaggagtttcctctttttcttttactacaggttggctgtggttcgcaactgacagcttatgtcaactgtaactctgttttgttgcgttgatctgaagcaaagcattaatgttgtttctttgtatgtttagttgaggctgaatttactgttgactgatttattctgagatcatgggagctggggggatatattacacaaacttgattaatacagtgatcctattagtctgatttaatcaaaattgtgtgaaatctgcaccattgcttgcttcctttagtacttctgaaatgtgagttttcaaagcagcagcagctatgctggtgcaagtttcagcgtttcagttgagacattcagcaggatcagttgagtcaaagtatttcaaatttgaccaaaattataggcaaaatgataaagttttgtggcatcaaataaatatactatgaaaatataattaatgaagaatgaagaatctattatacttagtttatatcataaatattagtttatattttattattttattatataaatttagttaaatttgagataatttgacttttcaaaatttaaatgtagttaaatttgagataatttgacttttcaaaatttctaaaatgacttataatttgggatcaagggagtactatttttgggtctctaaatttggtttagcccactccactctccaatctcctttgattcgtggtcggcagatatggttaggctttggaaaactttttgtttttttggtacggtagtatttccgttttcatgtgacaattattgttcaatcatagattaattagactcaacaaatttatagataaactgtgcaattaatttttttttctcgtttaagtttagttagtttataattgaacaataattattaaatacaaacagtgtggtatagtaaaaaaaaattcacccacccaattaaacaagggaacgtaacctgtgcaacccagtttcgtgtgcaatctatgtaaccaccaattaaggttacaggatacacacgggttagatatagatttaaatccacaggtagataggtttaaatgaaaaaaaaacctcaaacttagtggttacatagattccatacgtccatgcgaagctgagttgcatatgataccttgcccaaggcctaaacaaataggctcttcttctccgctctgcacagcctccatctcggtgagcagcgagaagaggcactccacgacaagcaccacgaccccgccgtctctagggccagagcctgccgccgcgccgaagcgaacagcggtactcgtgacgggctaaggatgcggaggtgaggttccgtcgcagcgagcgccagagcggtctggtgcggagctggcggtgctctggccgctgagcgcgcggtgggtgacgccccggccgaacacgaagatgtcggagctcgtagccgtctccatttttttttttcgaaagatccgtagccgtctccatgccaatgcgccacgatttctcacagctccgccgccggcgaactcactcgcgccgcatttcctgtcctctgtctttgtccgagcaagaagatctctagtctcacgcggctacagccatgtcacctccatggggcagagctcgaccccggcgtgggacgccacgtccctcgcctccgccctgaagaaggcggccgcctgtgcccgctcctgacgcatctggcgctgcgaagccggcttccacggtacgcgcgggaactgttcgacgagatgccccgcccggacgttgtctcctggacatcccctcatcaccggccacgcccaccaggactacaccgagtctctctcgcgctgctccggcgcatggcaggctctgtgtcgagctcaacggctactctctctctctctctctccggtggattgctggcttgtgctggtatcggccaaggtgcacttgctctagggaaggaaatacatgccagtgtggtgaagatgagcttgcatggaccagttgacccggttgtcgagaacggggttcttgatatgtactcaaggtgtgcattgagagtgtgttcagggtgatgcatgtcaggaatgtagttgcttagaactcgatgatggcagctcttcttgggagtaggcaggctgaggatatatgggtgatgcctcggcaagtgtcaagaacgtaggtttattagcgactgggcactatgaatatgctgagatgagtccgacgtgagtgatgctactgtgttctcattttgcacattgttgatccatattgtttttcttcctactacagcacagcctagactagtgtggggtgttccttcccttgataatctttatttcatctcgcatcccagatcatagtttttttttttttgactcaggtaacttgcctatgctgtcaagtttgtctcttggaggaaagctgcttccaatggcgaatctttgtagtttagcacaccctctcgtttaattcgtttcattcactgatgactacaaagactgttattcacaagttggacgacctgtgtcaattgtaacacattggccttgaagtgaagccaatcattgatagtgcttgctgctggaatgttacaagcttatcacttgtgaacaagcctaaaacgatagcctggctgttctggcccgtcactgtcgttgtctatttcccatcgctaagccacgccatgccaccgtccaccggtgaacagcatagtgatgaccgctcagctcaacctgaggctggcgagaggcgagcccagcgctcaatagaaagcaagttagtggcaggcaggtcaggtcgcgacctgggccacggccaccggaggcggcagtcccgggaccaagccgttcggcgtcgcgcgatggcgctgcagccgccgccgtccgtccacgccgtcaccatccccttcgccgacctcagggtaaccaaccttcgccgccgccgacgcgacattgccaactcagcggcgtttcatctctctttggagtttggagctgctgtgtgcgagcgactctgacggcgggtgcgcgcaggatcggagcaaggacctgagcggcttcatcgaggaaggcttcggaccccgggggctcggcatcgtctccatcaccgacgtgagtggtgctagcgcttgaggctgatgcgtgacgctgctgatgagcagatttcgatctcgcgggcgggttggtctcagactttgagctgtgtttgctttgtgcacgcgcaggtacccggttatccggagctcaggagaaggctgctgcgcttggcgccaaggcatgttgttgtcttgcactctcgtctaagttcaggggcttcaggccctgttcagcgcgatacaccatgattttgtaccttttttctttgctgactgaatactttcctgaaagacttcttgattactcttcctgctgtttgttagaatcgtcaatcttcctgatgatgtgaagaaacaactggaggacccagatagcaggtcaaaatttacagaatgctcttcaccagggagcttttggcatgattgcttatatatagtgtctacttgaatactcctcttctcctccctcttcttcttgttcttctttgttcattttctttcgggaaaataagagctcctaagctaggatttgcatatagcttgcacttcagttcgtacaaaaccttatgtatttcgtatgcattattggccttgcttcacagttaccactttggttggagtcgtgcggaagagaaattcgagtctggaagatggggtaaacaagaccttttcacttcgtgtaatcaactaatcatgcatcacattgtatatagagcatcctctaagcctatcagtttgaggataaactttacaataataaaaatgacttagtaggaggggaaatgtagttggaaaagaatgttagccgcaacagtagtgtattcaggtcaaaatgatctttcaattttgtgcttaatgtcttggaatgcttttaagcccataaggaaattccatctgttatatgcagacacgcccaaaggctcctatttcgcaaacccagtttttgatgtccctacaactgatgatgagcttgtaactaggtataatgttcctaatcctaagttatctttctgtgcagtttacttatctgacaactaaaaacatgttgatgttattattgttccaagcctgttttatgtactgaagcatcttttagtccacagtaacttcactatcttgctgcagctcaagcttgctggctgtatcattttatatctgtaatgtttgctacttatctgaacagtttgtagcatttatgcaaacaaaattattactccaatttttaggtgtggcgtattacatatgttgaaaacctcttgggttccatttttagatgttcatattgatatttgttcctgttttctttctgatgatataacatttagatacccatcatactgccgaccaaacatatggccaactgatcatcttctgagcttgaaataggtatgtgtttttcaggccatatatggtattcatgtacatttattcaagaaatcttattgcaaatcattactgttaatctctaatgttgttacgaattaaagatttgacactctgctcctcaggtttacatacattacttaatgcatatacaagcattgcacatgacaaaagttcattagctaattctgtgacagcgcatatttcaagaaaaatctttccagttcaaatcaacatgtttatattgataatatgagtatatgttgtaaattttctttaacgggtaggtggccttttccctcataccctctaatagacgaggtgactacctgtgccatcttaggctcgaaagcgggtgagcgtactggtactggaaataagctagctttgctaaccgatctaggctatataaatgtctatttaagtgtatgtgagttcttttcgtaaaagatgattttctcaactagagtcaagcccatatgtacaacatttatttcatttgtagcattcaaagatcttggaaaattgatgttggaagttggcttgatgttggctcatcattgtgattgctatggtatgtactattaaaccataactatgtttagtaagctttatctgtaaaacatcaactccgcttggtgcaaaagttaatgagccatggaatcttttatcctcttttaatgaaatacttgtgcactgcactttttttggagttttttttttaactcataggacatagtatatcataatagtagtatatgcaattgtgtaaatgtagaagctactgaccttttaagcatcttattattcatcatgtaagagaacagttgcatacgttgttattgatgtaagatgaaatccaaatgcaactacccaatagtagtgtatcctgtacgaagtgcaccccttgttctgatatatgtgctgcaggcgcgtcctggacagccagcttttggggccttttctcgaccctgcattttgaggaaatttcttccttctgtgatatacctcagggacgggggaggtcaatcccccaaggatcaagtttttttttggcagacatccatttgtttagcttaatagccaaattgttactaaggagctgttttaagtttttgatatgacatacatgctaactgaatctcttctccaaactttaatgtttaatttagttaccatttaatcaaatgaagcagcatctctgtgattttcagtaatgcagcaaggagtgggacagtacattggtgaaagccttgagaagacacttgctaactcaaggtgtcccaagggtcgtctgttgtagtactttcccaaatcatttaggtacacccagcaagcatatatatagagtctctaaaaaatacactcatgaaaattaaatgactctagttagcacataacctttaggtaaacttagagttacagaggttcaatatattttacaggagggcaacattaatacgctgcacgtttttacatacactaagacatacatcctttgcccatgtggatcaaaactttgccctcgttttgatatccaagatttttaccagatctaagatttaaaatgccgtctctaaaagtttatggttgtttgttgttgcagcaaacaggatgatggagttcaatctgtttcttcatggtgtggatggcatactgactatggatttttgacaggtgtcccacggtgcccctatgggtcggttctgtgtaataacatgtgatcaaacaagtgatacacatatttattaccaaatttataactcacaatctaacgtattataggaatacttggtctcaatg

SEQ ID NO: 4977 - DNA, 5449 bp, Sorghum bicolor
attaacacttcacattttaatttagttctgtttggaatggttttggtctttgcacacggctttattttagtagttgagagtcacttaagccataccgattgccaaataaagccttaaccctctttgtcagggtttcggtttctcaaagaacatcacgttttggtgttgtcggcttctgaacaaaaatagctttagcttcaccgttttcgtttggttttagctttagaagctgttctcatgcgtgcacgcttggatagtttcttactagttactactgcaaaagaggctttcataaatttcacgcaattgtgaagatcagctggttaggttttttatggtggaacctgtctatctgggtttaagttctcaacctagcgcgagtgctcgtatttttctagatttattttagaatttaaggcgctatattttcagtgataggcgacgtctctattaacaggacagtgaggcgcctgtagtaattttgtgaatctaagttttcagtgataggcgacgtctctattatagggataggattttacgtaggtgtgttcaaaaggacgagtgtacatacgttgtgagtgtttatgttgtactatgtgattctcaaaaaatattatgatatatctttgtagcctcaggctgatcatttttgagtacgaagttggtaagtaagtcactcgtttataaacacacaatctcaggatacgcatttgagcctttaggccttagtcgactctcccttcactcttttcaacgtgtagatcaatgaaaagtttgtttggttacaagcttgtgtcgaaaatgcttatacgagagggaaactaactttcgtattgtctatgcatgattactgtacaagtattctattttgttgatatgtttataatttcaaatgaaagtatataataatagtccacctgattggctgaaaacacagtgatgaaagagttaaaagagaatagctattgctacatgactttgccataaattaactaatcatggtaattaggctagacaacaaccttgctagagctaggagctctatttcatcagggcactcacaatacatgaaactattagtagttttatagcataggataccgtaccaagaaaccatctttcctaatgcaagattttctatagtacaccatataaacagtgatagaaactatatttgctcttccaatagactacgagtagattcttatccattgataactgtgaagacccagtttcttagttagacctagtttattagattttctccttctctcttcattaaatcacttatcacatcagcaaattgcctacgtgacattgtaattaatacccatataaactatcatagttttttttattatgagtgtcctctcgtagggctaaaaagatgtggtttattcaggtttctagttcattttaggccttgtttagtttccccgaatttaaaaacttttcaagattttttgtcacatcgaatcttacgggacatgtatgaagtattaaatatagattaaaaaaataagtaaataactaattgcacagtgaggttgcaaattgcgagagaaatgttttaagcctagttagtccatggttgaacaataaatacaaatgaaagtgctacagtatcacaatccaaaaaaattttagatctaaacgaggtcttagcccttgtttagttccattttttttttgcaaaatagacactataacatttcgtttgtatttaataaatattatccaatcatggactaataggctcaaaagattcatatcgtaaattacagacaaactatgtaattagttatttttttaatttatatttaatgctttatatatatgtggcgcaagatttgatgtaacgaaaaattctaaaaattgttgtaaaatttgtgatgaattaaacaaggcctttagtcccacacagtctcctgcaactgtaagctttcaccccccttaaaccctcgtcaaaaccgctgctcaccgaatatttccatttctaccctttcctcgcctccgtcccctgccgccgccgcagccatggcgtcgcggcgctgcctcctgcgcctcctctcgagccgcctcgttcctcagagatctcaacatcttgcaccggtctcgatcgcgacccgaaccctgacctctttgtccgagcccctcggctccccagctccccgggccctcgcctccccccggctgtactacccctcgcgctgccacttcgcgacccgctcctccggcgacgaggacgacgaagaagacgaagaagagcactacgacgacgaggggagcgagggggaatggggggacgaggaggaggcggtggcggcgaagaaaccgagcgggaagacggaagaggagaaggtagcggaggcggcggagatcggctacaaggtgttgggaccgctcggggctgacgagaaacccttcaagccctacgagcctgtcttcgctgtcgtacaggtctgcttcatttggcaccagtctttctgtttttgaggctggggtttggatctggtgcgtgattgcgtgtgattatttctgcctgcagatcggctcgcatcaattcaaggtgagcaatggcgattccatcttcacggagaggttgaagttctgtgatgtgaatgacaaggtaagaattgcgcttctagtgcgacctgacttttggctatgagcctgtgacttttgtgactaatagttgtgatgtttgaggttacgtttcactatggaactttatgttctttcctgcttcatgtaatatcttcatatatagttaaattgcaataagataatgttgctatacttgatggtgtaatgatatttagtttcctgaatttgttatggaaccccagtgatataactctttttatctactagggcgtggactattgaaattctgctcaaagttatgttgaaactgaaccttggagaatgtatttttagtctcacaatttcttctggattcctagatcatgattatagcatcttgagttgtgattagtgcattgagaagtattattattcaggccttgttttagttggatatatgtagtgtgtctgtatgtgtttttctgatggtttctttagtctattagaaactacaagttaagaagcacgttctactatgtggattcatgaattccttttatgattctagcaaccagcataggtctctctgtgacatcctgtgtattttattctattcatgatttgctgatgatgctgttcaatgcttgactttactgcagttggtcctaaaccgagttctcatgcttggttcgcaaactcaaacagttattgggagaccaatactacctgatgctgctgttcatgctgttgtagaagaacatgtaagatgaatagttgaacactaatttcttgaactttgttttttgttgctacaacatttttcactgatgaaatttatgaaatgattactaaactcagttttatcaaaacaaatcagtaaagtgtatccgctcgattagtagaattttggtttgcaaaatatgtgtcatgcaatttctgtgtatctgtgcagatttcagatttatttgagtgtatttattttaataattcggttggttattggtctgcatgcctatctacttactaagtattgactatttaaatctattgagtactgattttgatgcatttgaagtggcctagctgataggactataggagtagtcacattgcgccggagaagcctaatatccttatttcagttgcgactcaatcatctgcagtcggtacacattttctagtgcatgtaccattatgcttgtttgacttgatgattatagtttgtaacatgtaaatcatgcatctcattcttcattaatcaagtcttgtcctgaaggcatgttcaagtatagagtggtaaaatgttgttgtgtatctgctcaacagaaaatttacagtttactggatatttgctgcggactacctatctgatctgttgatgaccatgttgggttgcttcattcttatgcttataacttcaatgacatctgatgagcttgagttatagtactagttatagattttgctggcaccatatgcttgtatacatttataaaccatggttttctattttttataattaccgaagataggagcacgaacaatatatctttggcattaccttgccagagctcattttgacgcaattgtgtgttgtaacatatggatgtactgatttgagttaaatttctcttgataatcttgtcaggccttagatgcaaaagtgatcatattcaagaagaaacgcagaaaaaattaccgccgaacaaagggccatcgccaggtgcattttatgctgttttttgtttcactagtatacactgtaccccaaagaaaccaatgctgtttttagtttcactggtatacactgtaccccaaagaaaccattaatgttttcttggtacatgccttgtccatatgtagttcatgtaattcttactgtatgctgtaaccttttacaggagttgacaaaactgagaataaccaacattgaaggaatagataagccagagactgctgctgttgccgcctaaattcagggcaaagagagaagtaacagcgcgatttgtttatggcagcaaggcctgcctaggcaatcattttggccggtcttataagttcagtcagattttgatagtcgataccagtgaaatgatgcttcttttcttgttaattcaaaggttagaagctgtcagcattcggactcgggtacaatatctgacatgatgccaatgcactgagcagtttgggtggtgtggatcggctgttgtagtttacagtgacacttatttttcattcttggttagcttttctgtgcacatcctttatacatgtgttctgaacttctgatacgtcagttccatgttgattactagagtgtaataatgaaaccgcagtgcttcgtttctgcctggttcgatgtctgaaactgtaagccctggcctgtgcaaatgtagctgcaaaccttacgcttgcctgcactcttggtcttggtatcttgcgagaatttgcagcttgtaagtaccatccagggtgtttgtttgttttgttttttcctccctatattgccccagcttccaagtgccaatggaccagttcagaactgaaagtatcccgttccatttgacgcgttaaccttgcacattgccatcatttgatagactgtagactgatcctaatctgaagacatgtcgctctgtcggagtatctgttcgctgcggatagtcccgagctccgtcagctgcgcatctgcagtcgactagatacgttttgattgaaactgcacttgtgtcgcctcctgtccctttctgtatggtaattattatttacacttaaataaaaaaatactaatccttcttgacctctcacgttctctcgagtcaacgagcagccagaggccgcgtgtttaattatacattgggca

SEQ ID NO: 4978 - DNA, 9733 bp, Sorghum bicolor
ataatttttgtagaatgtagtatgctaagtgcaaaagctaaactatccctattttttagttccagggacccctgtctattttgcatttcagccacagccaggacaagttcatgtttacagcacttcatcatagccacccgggcttacccaagatattgcttcgcaagatacagagacccccaccgaataccaccgatatatcacataaacataacagcgaagatcacagaaattaccattaggtttagacaattatgtacctatatcatgatagcttttacaggtctgaaattagcatatataagaactaagtatactaacctctccatccgacattccagatacttctttgagaacagccgacatttttcagactggaatcctgtagatttcaggcaagaaagatagtctttcttctcctgtttgaacagttactatcactacttatgtaacaagtatacaatgacagtggtaactgatgaagaagttatgtagccttaccaagtcacactcatgtaagtgatccaatgggaatacacctttttcaggaggtacaggcctcacccccctatttccaccaaaagcaccacctgttaaaactcacaaattttcgtcaaataaatataattaaaaaaatagtaaatactacatatgaagtgattttaggagctgaacacatagatcaatacacctcattaccggcactcatttgctaaaatgttcaggtttcgatcaggattaatcaagaatgaaaggcctccaggaataaagtctgatctctagcaattgtgtggacaatgctcagcactgcaacaacacaataaaggcacaggtcagcgatgctagtagtgtgtctagcattaacacagttcattttgtaataagcgcattataattggtaagtgcagtgtacaaaatatatcaattgaaactttggtttggtatcagtaaataccatgtctgccaatttaaaacaaattgcaggctgattagacaaccttttagtgcactaccagaataatatcaacaagtatcacaaagccaaacttttaaatagccaacgcaagcatttgttttactgatgttgtttgcaagttgcaacaacaaacaaccaccggatgcatgaagctctgaagatgcatttgaacaagagtggccaatgaactgacatgcctagcgtgaattggtgaaattgcacgcctagggccagcatttaatcatctaaatcacacacaggttacatacatatatatagacatcaaaagcgctaaaattcaagaggtgggcattgtgcaattgaagttttaagtaaatatgaaatcaagaacaggggattgcgtggctttaggtgcacgagtgcagtgacagagctggtgaatttcctacaccattaataatcgtctaaatcacccacaggtataccgattgacaacaattgtactataaatcaagaaactggggattgtggcattgtgcaattgaagtttaaaagcaaatacgaatactcaattacccagatatcaaatacctgtctgtcccgcgcgcaactgggcaacgcgtgtccgcctatccacctgggcaccgccggccgacaggcggaagccacacgacggcacaagaacggcgcaagggtttgcccgcgcggccgagccaattttgcccgcctcctgtgccaattcgccgcgccgctcgcctcgatttgctagctccggcgagcggcgaccaccgacgcactggccaggcgagtccgcaacaggggagaggaccagggccgccggcgctacagcgcctccctttgctagttgcggaattttgggtgtcctctctggatcgctggtcccacttgtcattgggagacatcccggcaaatgctggagcctggacccacttgacatagggagacatccaggcaaatgctgtgaagtcgtataaaaacacaaccttcccacggacatcaatcaaaccctaaacccctctgctctccctctcgcgccgccgccatgtcgccgccgcagccgccacacacggtgccccgagagacggtggccagcgccgtcgcctccctcaccaagtggatgaagaagcgcgccgcggaggcgcgcccgaacctcctcgccgacgagcgcgacgacctcgtcgtcctccagctctcgctccgccgcgtccccgcctcgcgcagcaccaggccacgcctcctcccgctgccgcatcccgtcgtcgggcacgacggtgcctccgtctgcgtcatctcggacgaccgccccaagtcgcggtccccttccgcctccgacctcctccacgcgtccaagtcgctccacggtctccccgtctccgaggtcatcccgctctccacgctccgcacggactaccgaccctacgagtcgcgccgccgcctcgcggcctcccacgaccttttcatcgccgaccgcgccatcctcccgctgctgcctcgcgtcctcgggaaggcgttctactccaccaagaaggctccgattggagtcgatttcacccgcgtcggttggccggagcaggttcgcaaggtccttggctctgcttttctctacctgcgctcggggacctgctcggggatcaaggtgggtaggctggacatggaggaagcggagatcgtggacaatgtgatggccacggtggaggaggctgtcgagaaggtgccaaagaagtgggccaacgttagggcgctgcatctgaaagctgtggattcagttgccctaccaatttaccaagctgtgccggagttgggtatgaaaatcgaggtgcctgaaattgttgggtctgcggaggtcattgatgctgcagaagcggagactcgcgggaagaagagtgacaagaagaaggcgaatgatggtgccagtggaagagtgatatttggcaatatcagtgccaagaggaagaggaataaaaaggagcagattgaggaggatgttgtgatgcaggaagaagttcaggtggagacagagaaaaagaagaggaagagcactgcggtttctgccgatgacagtcagaaggttgacaagaaggggaaagagaagggtaagcgtggtttggaaaatgagaaggttgacaagaaggggaaagagaagggtaagcgtggtttggaaaatgaggtgaaagaagccagtttggacaagaagaagattaagaaagggaagactgaggagaggaagaagaagaagagcatgaagggtgatggtgaagttggtactgatgaaatacaggaagataagaagatcaagggggagaaatcggatggcaagaccaagaagttgaggaccagggtaagagtataatgttacagctgatattactgttggagatgcctgttcaaatagttgatcgacaatgttcttcatattggcaggctggttattcaaagtatcaatgaattgagttagttataattggtatcagcctgaagaaccataccaggctttacttgagaagaccacctatcacttataccgcagaacttgggttccccagagatttctcctgaagttgtttcttcagttttgttagcttagtagctcaagcctttgtgttaagtatggcgaaactgtttcttgctaagactgtacttcgctcgacttgcaacaattttgtgttgattttctaagaatatgcttatgttgtcctgctctctctgaatccatttgtctccttaataaccatgtcactgttgtccagatttgagctagttttgttatcctttgtacatgtattatgaaccattaccatcgtcttcatggtgattgatgatactcttagttttgtgggcaattgggttacattatgatactcttagttttgtgggatcacagcaattgggttacgatcctagattgagttcacttcattccatgaatgctgtgcatcctttcaagaaaaatcttcacaacagcttttgatttatttactctgtttgcatactggatggaaaaacagctgcatactggatggaaaaacagcatctgtgttctggtgcttctgaacatcctatgttgagatggcagttgaatatgtaatggcagttgaatatgtaataattggattcactgatcttgtatacttgaaatgatagagaacactgttgtcatcgtagagacgtaggccttgtttagatcaaaaagtttttgtattttgatattgtagtacttttatttttattagacaacattgtctaatcatggagtaactaggtttaaaagattcatctccaatttataggtaaactgagcaattagtttttatttttattaatatttaatgcttcatgtgccgctaaggccgtagtagactttggctattatgatgagtggtactgctattcttatttttcacttatatgatggcaagaaagatgatagccagcccagcaccagggctgagcgagttcacggtgagaaatggcccagatggcgctatagcactcgtgtcgcagacggggtagcttcaagcgtcaacccaatcttctcttctgatcaaacttgttcggctatcctttgtcaaaaaaaaaaaaaagttcgcttatcaacacgacgcagccggcactcgtgtcgcctgcacctgccttgccgacgccaatcaccagatgccaagccgtgcctctgatcacgagagtagagtcaacaccccagcacgacgtgctcgtgtcgcgccatctctggcagccgcccaacgccgcagcatggatctctggtctactacgcgccgcagatgttgtcggacctcggacgcgttgcattgatcctggggaggcgacggcgacggcggcgtgcgagtcaagaggccaatatcccggacccatacgcgatggagattcgagaagaagccgctgttggcggtgacgataagctcagagtaacgacgactggcgcgcgggccccgcccgtcgggcttggacgcccgcccgcgattggcgggcctccctcccgttccagaagtactggggggcgaagggcagcagcaagcagcacgcgcccccacgcatggcgtgccacggctcgcggccgcgccccccacgcggcgcccatgcgcgcgccctcccgtgtggtcggcctcgggcgcctcgcgcgcgtcaccggtgattcggtgaccggataagcctattcagccgtcccatccctccgctctcccgctcccggatcgccgcgagctccttttttgactcgcgtcgcatctcctctacgcctactttggataagcccattcggaacttggaaggttgagcctctgaggcgctcgctctcctgctttttaatttcgccgacggccgcctggcagatacgaggacacggctcggcgggtttcctagcagcgttcagggagctcctccttccttctgctctggccacgggggctgggacgtagaggtacgttggccttctttcttgtacgggcgatgtgcacgcggggcgcagtctacctaccaactgcatgcggcccaagtgtttgtggaaatgcctgggtgtgtgattggcggtttcgctgcaacttgtctccaactcattccacgtgcgtgttcgagtgcattgaggtgaaaaatagttaatttttcattcaagtcgatgtggattgaggtggatatggtatgaattaagatggatacggtgcaatcccgaacaagatcttaggaactggctgatgcaccttgttgttttgattggctcatcacatcattccttagtctcatttcatccgggaatcaaagttactacttatctgttgggcccttgcccacagtaatgtatgctttgccttgatcaacatgtgataggttttcagtgaaacctccactattttttccttcttgagggtgttagatcgtggaagaggtagctatgatgcgattgggcaacgtcaatgtttttccgctagcaatgggcataattgttgttagtttaaatgtcaattgcacaatgttaacttgcctcaaagtttatttaaaaaacaaaacaaaaatccatgtatgatcagtcagtggttcaaaattggttctttatactagattttcgtgcacagccatattggcagtgtggataatcccctgtccgactgagatgttgatcttctcttgcgtagttgtgtcatatcataaaagaatagtctgaggtctattatgcaggtaaggagataactctcttgtatccatgaatgcgtttgttgatacatgctgagctcttgatgcgattttttcccccttttgttaggacaaaaatgtaccatcaggggtgacactctcctgtatcatctgcttgggacatagatggatgactatttttcacgcttcctaaaccttggttggcagctaagacaatacttgacagaattaataggtaccaggaccaacaacttgagcttgtatatatcttcgttcacaaaactacttgggatttgggtagctgatattttagagcacctagccatcttgtttcttttgctgattctgagttgcaagttcctaagtacaggattcctagtttctttcctttatttatatgaacaattagtttgatgcttgactactttctattagaaagtagtccgagatgtattatcattttgaaacacacataaccttctatttttggaggcattgtggttagaatttcggaggctttgactggataagacatgtttgatgaatgatgagacaaatccttctcaaaactagagaagcctgaaattttatgtttttgttgtgtttttatcttttttttatgtgtttgttttaatcctagcagaaaattggcttcggtccattgattggattcctcaacgtcttggagtccaattctctgctagccatggtggatcattgactggcaccataggatattttcatgaaggggcatttgcattatctgttggttatactactacagaagagcagactacaaatggaacatctgaaggcacaattttcagaaaaggactttccagtatttatgaaaggttcagttttcttatagcttcatcaatcagtaagctgattacatctgttgttgtcttgtgtctcacattcactttgcaactttttgtgttgttagatcatatgtcaggtcttcctatcttttacatggcttcaggctggtacgaagattggcattcagtgtgcgagatcagtggaatctgttttcaagtgaagtacatggcaaactaaccaggttagttaatgccttctctgttcagacatctatatttgcttacatgttgcatcttgtggtctgaggacttcgtgtaagttgcatcccagttttctttgttctaattagttctaagatatgtcatttttctatcacaggatcttacatcgtttctggacaacactacagggatcttgtgaagatataggatggctgcaaagaactcgggcatcactttgttcagttgatgggacaggtcgcttcaaggagattttgcatgacatcaggtgatctttttgtgcccagttttagtgaactctgacacaaaaaaaaaaacattacacactaccacctttttttgtagaaagcatttgtagcatgctttcaaatactgcagtgtggaaattttgagcataaactaccaattaagttggactggaagtaattaatcagttctgagaaggccggcaatactaaaagctgctttatgtttcagaaatggcatacactgcctgcctgatacactggtttacttatttattcctggtgagatatctttctcaacatagctggtttctgcggatgatccttaaatgccattgcttacaaattatcccgtttgtacaactttatgcaggcctttttagcaaccacagtccactttacttcaccaatacgaaacgattcttttcaaaaatgggattggcttgccatattgcgaaaattcatagcgaggtaattgagctgaagggtgacatgcaagtgttctttttttttcctagtgctaggtttcattcttgcttcatattatgtcctgaagcagctgctgcttgtactagtatctcgtactgttacttaccatttgctttgtctaggcgtcagtagagaacaatgcgtgggaactgaaacaatacattgaggagctctactggggatctggtaagcaggttctgctccttggccatagcaaaggtggagttgatgcagctgcagctctttcgttgtactggtctgagctcaagggtaaggttgctggcctggcgttggttcagagcccatatggtggcaccccggtcgcctcagatatccttcgagaaggccagatcgctgataaggagacaaggaggatcatggagctcatcgtatgcaaactaatcaaggtccctatcatgaactgtttctcagtcaaatccgttgttacaaaattgttcatcattatctcatccatttcagtcttaaaaacaaatgaacaattgcagggtgacatcagggccttggaggacctcacatatgctaagagaaaggacttcatctccaagcacaaactccccatcgatgagctgccgatcatctccttccacactgaagccagcaccgcgcccacggtgctcgcgtcactgactcatgtcgcccaagccgagctcctcccatggctacccctgccacggttcttcctatctgcatctgagtttgtcgagtcaatgctcgcttctctgaaggtccccgtggttgcgcctgtgtctgcagccatggcgctcacagccctccacctgcggctgcgctatggggagaggagtgacgggctggtgacacgacgcgacgccgaggtgcctgggtcggtggtggtgaggcccgagaggaggctggaccacgcgtggatggtttactccacgctgaagatgggcagcgctgaggccgatgcaagcgagatgtgcgaggctctgctggccatgctcgttgagattggcaggaagaaatttcgctgaccttctggtcatctggagttctcgatggttttggttatatatgcacaaatgtgtccaactagatggaacttactacgagtagcatagcacagtagcagtgtagcactatctgttgtcgcacacactacaaatgatagaaatcacggaatattacagtctttacagggaacagtggaaattagatttattagcaattatactgtggcaatatgcaattttgtttttgacgagccacatgctactctggttatgtaatgttattaacacttcacattttaatttagttctgtttggaatggttttggtctttgcacacggctttattttagtagttgagagtcacttaagccataccgattgccaaataaagccttaaccctctttgtcagggtttcggtttctcaaagaacatcacgttttggtgttgtcggcttctgaacaaaaatagctttagcttcaccgttttcgtttggttttagctttagaagctgttctcatgcgtgcacgcttggatagtttcttactagttactactgcaaaagaggctttcataaatttcacgcaattgtgaagatcagctggttaggttttttatggtggaacctgtctatctgggtttaagttctcaacctagcgcgagtgctcgtatttttctagatttattttagaatttaaggcgctatattttcagtgataggcgacgtctctattaacaggacagtgaggcgcctgtagtaattttgtgaatctaagttttcagtgataggcgacgtctctattatagggataggattttacgtaggt

SEQ ID NO: 4979 - DNA, 10241 bp, Sorghum bicolor
gcgcacatgtctcccccgctaccgatggacggtggcggcatccggcactgtgtggcccaacgaaagggatcaccggggcgtcgccagccacatcaaaagaattccccgttgcgtgcccgtccagcccagcagagaccaccagcaggttttcgtgtggcggagcagcgaggtgggacgtcacgagccggcagccacccaccaacccccccgccccgtttcaccgaatccaagtcagcgtgacatctcgctttcagggccttgtttagttcccaaaaaattttacaacatttttcagattccccgtcacatcgaatctttagacgtatggatgaagtattaaatatagataaaaataaaaactgattacacagtttggtcggaattgacgagactaatcttttgaacccagttagtctatgattagacaatatttgttaaatacaaacgaaatatatattattcacattttgcaaaaacaaagcccagattcgcttcgcccccgtcgtgcctatccgcagagcggagccgaagccgagccacatgaacggtgccgctacgtgtccgggtgttgtcccgacagcatcctccagaaaaccagaacgcaacgccgtctttttctcacttttggtttcgtgtggccgtgctgtggcctggccctgtgggcacgcttgcagctgcagctttcgggcgggagatcaacgtctggagtttggaaaaccaggcccatggcaaaaatcttgatggaacatggaaatgcagcagcagtattttttatactagtccatccatatatataattgaacacaagttgggttttggtaagcaacgggataccattgacttgtccaattgggcctttctttcggccgccagcctgtcaatacgtactacaccgtgcctgtctattttgaacgcgtctctgttctactacgttcacgtctccgtctcgttgctgtcaaaacagtgcaggtcggatcgacgtagcacagccgccggagccaaaatggccagatgtcattccgacactaacacacggtacacggggctaactggaaaccacgatttcccgatcaggatcgaagaccactagtatatgatctacagtgtcgcacgcacgagatttggacgcggtgatgggcgagggcattcctatccacgtcaactttttcacactactagacgatccgcggagaacagggtgccgtgtccgcgcgccattccacttcgtgcctgccatacacgccggcgaccggacaaccaggctgactgcaagtcgagtcgtgaaacacgccggcgaggcgaccccaacaggccccagcgaatggtgctagccactgccagccgtacgcgtacggcgggccggcggcaggcgatccgtccgcgtccccgcgcccaccggccgcgccacaccctccccacgctctcctcacgcctcgcgtgcggtgcaataaaatcaggcggagtagcattgacccgcgcggatcacgagcgtctcggctgcacggcagcgcgcacggtccaggacctgaccaaaccaacaaaaaaaaaacaaaaaacaaactgcgagcggtgcgggtgcccgcggtccgcaccgggcaggcaggcgcgcacgcagccgccctcgggtcgcgtggccgccgcgccgtgcgctcgtgccgagccccccgtctctttttccacttttcccccaccacgcaccacgggtctacggcacggcgccaccaccctcgccgtatttattccgcgctcctccgcgcccccggaccggaactcgccagtcgcacccccgcccgccgcccgctccgctttgcaccgcttttttcgaacgcttctttagcttttacttctctttttctcttggcttccactcctcgcccacgcctcctcctcatcctcttccctttcgtcgtcgcttccgttcccgtgcgaatcctctgaccaccgcggagccgtccccgaaggaaaccctagcgcagccgccgatcaccgccgcgcacagcatggcgtccccggcacgccctaccgctgcatccgtctcgggcgccttcggcctgtcgcccgaccccaagcgctgctccttcgaccaggcgctccggcagaaggtacgaacccgtacacctttcgatctatacgcgcgagatctccgtgcctgacgctgttttggccttgggggagcaacgaacccgcgcctgacgctgtctagacttccgaaccgagtggtttcgtgtgcgcgtggtgcgttgacaagagtagcgggttcgttgctcgttgccggggatgggcgcgcaccttgctgtcttgttctgatccgtgccaacggttgtggaatggtttcgtgtgcgtgcgtggtgcggttcgttgctcgtttgccgggatgggaggtgcaccttgttgccttgttctgatttgtgccaacggttgtggggttatcgtctgttgtggatttgatgctcattagccgcttttgaagcgtagggtttgggtacgcttggttctagtgttttcctgattattctggaccgttggagtgaaaggagggcctaaaaggagcggacgtgttagccagctccgggtggagatttctcgtttctgttagctgacttttcagatttgtggctctctcgatacaactagggtagcatgacaatcaggtgcaacgctgtctaaggagatttgtccttaggtgcctgatgcagtgatacgtgaagtagttgtggttctgttctctgtaacttggcacaagagagattgtccatcttacatgctaaaccttttatgttcatcttatgtggtctaatgtgtctattatcccaatgaatcaggattttcaagagaacagactgttgatgtcatttgttaatttccatgagcaagaaaagatttctaaagaaatcgtaacagacgctatagaaagctgtatgaagaaacaagcagataacttgttgaattcactggaagttatcagcggtaggctgtcacaactggagttatattgctataagttggaaagatccattggagaattacgaagtgatgtgatggattatcataacgaagcaaatctcaactttcagtgccttgaaaagcaagtgaaagaggtatatcttttttatacattgaaatatcaaattactttgctgattttatttgagctctgttgcaagatgcactactgttggtttcaattttttatgtaactagattccatttcctgtttcttatgggctattgtttgggtagaatttgctagtgttggtttatggatgaacagtacaaaatgtatgtcatgaacagactgtgttctgcttttgatataagcagagatctcgttgttttccaattaaatcatgtaactgaaatatggtggaatggtttttcagttgaatcattagacattcatcaagtgcatactagatcagtttctgcagacacgcgctttattgatttattgggatccctcaggacaaactcattgagcagtgctgtatcaagatccatttgaactgaatctttatgctctggtaattatacgttatcagcttagtgtgcatagattagcccccaccccacccacacacacaaaaatcagatctgatagtattgcagaaagttgtatcaatgcctactatctttagattttcaaattgtggcattaaaacttcattgatgacattaactctgtgatgacatttttaagagttccactcataactgtacatctgtacctacatccatggacaggttcagaaatctgtgcaggtcgttcaggagaagcaggagcttgctgaaactcagaaagaaatgagcaaacttcaggtagtacatgaggattctgcacaaaagagtgaaggtaccgctccatcagttttcatgactagagaaaatgaggttgcccttgtgccatttcaacaagtaaatgctgttcagtctcctgctgtgcaattccaaagttgcagtggccttattctacagcaacttgtgccagtccaagaccaccagcgctcgaaccaaactgctgtgtactatatgcgaggccaaagtcatccagaacacagacaggcccaaatgttccaagctgctgctcaatctgtgcagacacacactcggaaaactcagccacagacagtagttgaggtaccccaggtaaccagtcaggcaccagagttttaccctcaaccgcagcatcaatggcaacatcaaactggtcagcaggttcagtcccaagcaaggcaaccacaaccacaggttgtacagcagcagcagtacagcaatatccagcaaggtccagcacagatgattcagctgcaaacgtcctctccacatgctcatagcacaccacaggtcacagtagtatatcctccatatggggctcatcagtctgcatgtggtaacactgaggcacgcaccgggggcatggtcgtgccaccatcctactctacaatttcctcatcccagcggaagcatcatgaagctgctcctatttatgtacaaagcaacacagtttctgttccattggcggagcagcatcagcagcttcattcactcagcaatggctcatttgtacctcagccaagcaaagtcaatccatgtggtgtcacatcatacacggtacaagggaatgcacaggcctacaaccctgcttatggaagcccttccagcaatcctgctgctattgttgctgtccttaatcaacaagcacatagcagtgctcccatggtgcttcatcacttgggacctcagtcagtgcagaaccatccagtagacattgctgaaaaagttgctcggatgggttattcaaaggatcaagttgagggccttgcactccgtatggttgccgcaggccagcctgcagaatataaccacctgcacgataggttgagctctgttagccatggggtagctcctcatgcatggtctggatagttaagaatgacaaatgcagctttgtcacgcttactcatgagatgtttgtgtgatatatctcggtatgtacttcactatcgtcggaaatcttcaggtatttcctctggcatctttttatcagccaggattacatattcaccagcttattttttccagctggaggatcgagatgaaataagactgtttagattagttaaaatgatgatgctggcatatgtcctaccttttaatggacatatgtgcttgtaacctgtggacttgcacacgcacgtttgcaatataaaaagatatgatagtttgttggttgttactactttcttatgaagtgttgagctcgttcatctgcggacgccagttgaattgtcatatgtgaaatatacgataatctgagtttttttgagaaaagaagatgtgaagctcaattgacttgattttgaaataaattcaattgatttgcgagtttgcgtggatgatatcatgagtcgggaatttcggataactctcgggttccagcagtcatgggctgcctcggtggccgaataactgggttttttatttggtaattgtggagtcatgatgtaattgattgccgaccaatctctcctgctgcctctgctgatacctccgaccttctgcttgcatcgcggcacgccggggcaacacctctcatcgtcatgggctcatgggctagtcgtcgaccgaggaaacacatccacatcgctttggatcaagtaccggtccggttttttttttcttttatacagtacaacagacgctgctcaacattcttcgaagggagacagccgctcgttccgctgaccacaacaaaccgatcgaatcctctttctgtttacgacatatataggccagaacagagatcacacaaaaaggcagaggaaccctggtccaagcacagtagtgcatagaccttcatatcagcctcttatccgtaatggctatcaaatagcaagctaggagaaattctattggctctcaatagtactttacaaatagctagcgagatgacgtataaaaataataataaaaattagcactctcattggatcgaggagagagatcaaatagctagcgattttctaatatagctagtctagcacgatcttttagaaataactctctcacaatcctcttcacaatagctagcgacttcttaatagctagcgactttctaagctaaatatttacaaattgctattgaaagctaataacattcttcctagaaatcaaatagccagcgatttaaacaccattagagacgctctttcactgtcgttctggcgcacatggactaacggtaacgacatccaaatctagacagtttcggaactcgttaattgctccctatacagtgcagtgtgtagtcatgcgttgtagtttcggaattcgttgaatctgctcctacacgctgcagtgtatgtatagccatccgctgttgtaacattattattattatgttggtacaacaaaccaatgcttcagagttcagacacagatgaggtacacgcacaaccgcgacttgcatgcatatcacatgctgatcgtcagttatgaaggaactgaggatagagagaccggcttacaataacttagaagacacatcatgcccacatcgattctgcaccacactggaagggacgaaaggctagcaccccggatgcgcgcatatgttccgtcgaggaattcagcaagttgggtggagcacgctagtctctgcagacctgcaccgggaagcacccttccagtgataacttggctcatcctgatttattagtccccgaatagagtagagagcagcaggtcttgcacgaatgtggctctgacgctggcttgcttccgtttctgctccctttcttcacttgtgagggacgaatcgatactgtgccaccaaaaaagaacagtggatgactgtcaattgtaagatgtgtaggatttaataatggcacggacaactgctttatcaactgtcagttgcaaaaggcaaagagaagtttgttactacactgcttatcattttttcaatgaaaccaacttgctggcttgaagactaattattcaataaaaggcatctatcgaagggggaaaaaggcagagctatctagaagactaaaactactggctcatatttgcatggccacataagatttccctgtcgggcctgttcgtttcatcgccattccacttggattgcgaaagaaacgaacaggccatcaaacaagtccattcagatatcgactctaaactaatccagacagtaacctgaagattatggtgttcgcatgattggatgaaaaataatgtggttgtaagcctatcaacttgaatatatcgatgctagtgtttcgttttagcatggatgtgtataaaacataccttaacttccgtgcctgagcaggcgtttcttttatcatcgtagcatcatcaggaatggaaagagtcgatttggatgtttgctctgcatctgatgtagggaagctaaggccgaatgatgacagaagaggatcagctgaaatatttgtggtgctgttattgttgcttgatctatgtccgcctccaagaagcacctgcaaatgggcttcccgtagatctcggctcagtaaagaaagggcctggctgcctggaatgatgaatctgcgcaaccggcgacgattctgcaggagttcagaaggcgaatgagtttcaagggaaaaagaactttgtaaattgaccagctacatatgtatgcattaattgttgagctcaagtaccatgaatttacatgtgcacagtgtgagaataccttgaataaatatccatgttgcatagtaatatggttaaccatatccttcgtaaccatctcagagcagacagggcaagcctgaaatgggcagtggaaatatcagggcaagaaagcaaccagcaaaatgaatcataattccggcataaaagcaacatcattaaggtgagtttcatacatgctataggctatagcttacacaatttttttgagggagaacagataaatagaagatcaattcaactgaggcaaagagatggggtcctcaaatctacacgcagcagatcctataacattggagacaactaacagctcttaaatctacaacttaggataagctagaagttctacccctgatactgagttcttgtgttccttcctaaactgatgtttcagttcactagtccaaaggcagtgatattcattctttggataaaacttgaaccctttattctccaaatgcctatatgtaactccttttgcagaaaactttgtgtccttgggttatccagatggcttagctccgtttgacgtcgggtgaatgtttgaggtttgcaagaggtttagtaactcttaaatgtctttcgctgctctgttgcaatggaaatggggagattcctcgcataaaaaaatgcctatatgtaagctttcttgtagcaggcttcagcccacatttgtatgtagacaaaaactcaagccacaggattatataacactgatgaatggtagaagggctaccgatggaaaagagccctaagtggtcatatattcatatcccaaaactctagtttcatttagtcagactagaaggatagtgcaagtaatcaaattatacaatctttctaatacttctcgtgtccacagatcccccaaagtttttttttttaaaaaaatctcgttcttcaagtcaacgccaacgagctgatagttccaaattccaatcgtgtttaacccatataatcaagcatccccgcctgcacgactagcatcatgaggtcagcccccaggtcaaccaagcacaaaattgttcgatcctctctagccatccatgtagaaagcaaaacacatcagattaaggcacccggtgtggggcactcaccgcggcttggggctcgaacgggtgctcctcctccaggtgcgcgcagagggatccgacgtcgtggtcctcgtagcagtaggggcaggcgaactcgggcctgacctcctcgtccatgtccagctcctccatccccgcccgatctggcgcaaaagcaagcccagggtgaagcgatcagaaacccccacaaccatcaaggcaaacccagcggaacggaacacggaaagggagggagcgcggtcgccgcaccgctgtggccgagctgcgccgcgtagaagcgcttcgcagccgccaggcgcgagatccagtgctccgagtccatcgggtcgataggtccggcggaagcggagcaagcggacgggtacggctcctcttccttctcccctctctcctccggcggcggtacggtggcagccgcggcgccgcgcctctcctctcctctcctggacccccgctcggcctcaacggcgtggggagcagtcggatcggatcggatcggagcggagctcgccgcagatttttggccgaggatggaggggagctggagctggagcggaggggagggaggggaagccgagggccctctcttatcgggaggtgagagtgagatgtggagagagaggaggaggaggagagggaccagggacgtggcgccgctggttcgtgtttttttttttttagttcgccgtgcggtcgccgtccctgccggcccgcgccccgcgccgctccgaggtgaggtgagaaggcagagcagagccagtgcccactgatggctgactcgccgtgtcagcccgtgaaatttcgcgggggtgacgtgtggggcgggaggaggcgcgggacgcgacctgccgtccacgcgcggcgacgttgcgtgggcctgtctgcctgcggaatcgttggatgggaccaccgtaccagtgtccagtagccgcagtggtaggggcgtttggttaggggttataaaatttaacaggcgcggtaatatatttatatttataattaatatcaaagtatatattaattaggtttaaaaaacttatctcataaattattttttagatatgttttaatttcgtaaatagtctatatttagtattatatatatgtgattaaatattaaataagataagtgtccgaacacctaaggacttgtttaggctctgtttacttgcagaaaattttacaaaatggctatggtaatacttatatttgtattatcaattattgtccaactattaactaattatgctttcacaaattatagacaaactatgcagttaattattttttatctatatttaatgctccatgtatatgctacaagattcaatgtgatgaaaaatctaaaaaaaatctaaaatttttgggaactaaacaacctcttagtttcacaccaaaactttttactaattacatcgaatctttaga

SEQ ID NO: 4980 - DNA, 5628 bp, Sorghum bicolor
gtagagcgcgttgtgttttgttgttgtgtatcagacgtttttcgtgttggactgttggttgatcgaagtgggggacgctgccatttgcagcgtccgcgacgacgacgaggcaggccaccaagtgttgaacagcttgttgttatatatggttgagaacttgagatgcatagaataggattccttgtgctgtgctatcttggtggttgtatgttcatctcgtagtccatgtcgtagtcgttgcagctttgcaaagggagggatggaataattgttgagcacatacaaatactacgttctctgtaatgtaagtaatagttattgcaacggtatttatactccctctatccaaaaaaaaaaaatggaattctagatttaagatgagttattaaacattcataagttcgaatgagatttttagtgctctgtgaactccgttcgcggaaaaaaaaagtgatttgtagtatgtctctaaatatgtttacaataaaaatgcactccattaagtaatgatctttcaatataataaatgttagtgttttttttatagatttgagtaacgcactgagtcaaaccttttgacccttaaaagataatattaacatttggatctttaaatatgtttaatatgaaatattaatatttgcatctttaaataagtttattatgacatcatataatgtgattgatcgaatgatgtttatttgaggtagtacacattaaagttttggcaaatcttcactgtcttctgcatgatgtttggttttggcaaatcttcagcatgatcttagggtgcccttcgtcacctgtcgttgcagtagcttggtctctatcctctttctcgactcggtgccgccgcaacactttgcatgtcggagttgcgctctccctccgccaggtgtattcggcccaccgtcacataccacaccactgccgaatttgcaattctccggaggtcgcactcgcacagcattgccggacgcggtgtcacggacgcctgcagcgcgcgggggctatctttcctgcatcctccgtctgcccatctcgggctctcggcctcggggtcgcgccgtgtttacttttggatttagctgtatttttattttatttagcaattagtgtgtaattataaactaattactagttttaaaagtttcattttgtgatttatagacaaattatataattagttttttttactgcatttaatactccatatatatgtctaaagattcgatgtaattagtaaaaagttttggtgtgaaactaagaggttgtttagttcccaaaaattttagattttttttagatttttcatcacattgaatcttgtagcatatacatggagcattaaatatagataaaaaataattaactgcatagtttgtctataatttgtgaaagcataattagttaatagttggacaataattgataatacaaatataagtattaccatagccattttgtaaaattttctgcaagtaaacagagcctaaacaagtccttaggtgttcggacacttatcttatttaatatttaatcacatatatataatactaaatatagactatttacgaaattaaaacatatctaaaaaataatttatgagataagttttttaaacctaattaatatatactttgatattaattataaatataaatatattaccgcgcctgttaaattttataacccctaaccaaacgcccctaccactgcggctactggacactggtacggtggtcccatccaacgattccgcaggcagacaggcccacgcaacgtcgccgcgcgtggacggcaggtcgcgtcccgcgcctcctcccgccccacacgtcacccccgcgaaatttcacgggctgacacggcgagtcagccatcagtgggcactggctctgctctgccttctcacctcacctcggagcggcgcggggcgcgggccggcagggacggcgaccgcacggcgaactaaaaaaaaaaaaacacgaaccagcggcgccacgtccctggtccctctcctcctcctcctctctctccacatctcactctcacctcccgataagagagggccctcggcttcccctccctcccctccgctccagctccagctcccctccatcctcggccaaaaatctgcggcgagctccgctccgatccgatccgatccgactgctccccacgccgttgaggccgagcgggggtccaggagaggagaggagaggcgcggcgccgcggctgccaccgtaccgccgccggaggagagaggggagaaggaagaggagccgtacccgtccgcttgctccgcttccgccggacctatcgacccgatggactcggagcactggatctcgcgcctggcggctgcgaagcgcttctacgcggcgcagctcggccacagcggtgcggcgaccgcgctccctccctttccgtgttccgttccgctgggtttgccttgatggttgtgggggtttctgatcgcttcaccctgggcttgcttttgcgccagatcgggcggggatggaggagctggacatggacgaggaggtcaggcccgagttcgcctgcccctactgctacgaggaccacgacgtcggatccctctgcgcgcacctggaggaggagcacccgttcgagccccaagccgcggtgagtgccccacaccgggtgccttaatctgatgtgttttgctttctacatggatggctagagaggatcgaacaattttgtgcttggttgacctgggggctgacctcatgatgctagtcgtgcaggcggggatgcttgattatatgggttaaacacgattggaatttggaactatcagctcgttggcgttgacttgaagaacgagatttttttaaaaaaaaaaactttgggggatctgtggacacgagaagtattagaaagattgtataatttgattacttgcactatccttctagtctgactaaatgaaactagagttttgggatatgaatatatgaccacttagggctcttttccatcggtagcccttctaccattcatcagtgttatataatcctgtggcttgagtttttgtctacatacaaatgtgggctgaagcctgctacaagaaagcttacatataggcatttttttatgcgaggaatctccccatttccattgcaacagagcagcgaaagacatttaagagttactaaacctcttgcaaacctcaaacattcacccgacgtcaaacggagctaagccatctggataacccaaggacacaaagttttctgcaaaaggagttacatataggcatttggagaataaagggttcaagttttatccaaagaatgaatatcactgcctttggactagtgaactgaaacatcagtttaggaaggaacacaagaactcagtatcaggggtagaacttctagcttatcctaagttgtagatttaagagctgttagttgtctccaatgttataggatctgctgcgtgtagatttgaggaccccatctctttgcctcagttgaattgatcttctatttatctgttctccctcaaaaaaattgtgtaagctatagcctatagcatgtatgaaactcaccttaatgatgttgcttttatgccggaattatgattcattttgctggttgctttcttgccctgatatttccactgcccatttcaggcttgccctgtctgctctgagatggttacgaaggatatggttaaccatattactatgcaacatggatatttattcaaggtattctcacactgtgcacatgtaaattcatggtacttgagctcaacaattaatgcatacatatgtagctggtcaatttacaaagttctttttcccttgaaactcattcgccttctgaactcctgcagaatcgtcgccggttgcgcagattcatcattccaggcagccaggccctttctttactgagccgagatctacgggaagcccatttgcaggtgcttcttggaggcggacatagatcaagcaacaataacagcaccacaaatatttcagctgatcctcttctgtcatcattcggccttagcttccctacatcagatgcagagcaaacatccaaatcgactctttccattcctgatgatgctacgatgataaaagaaacgcctgctcaggcacggaagttaaggtatgttttatacacatccatgctaaaacgaaacactagcatcgatatattcaagttgataggcttacaaccacattatttttcatccaatcatgcgaacaccataatcttcaggttactgtctggattagtttagagtcgatatctgaatggacttgtttgatggcctgttcgtttctttcgcaatccaagtggaatggcgatgaaacgaacaggcccgacagggaaatcttatgtggccatgcaaatatgagccagtagttttagtcttctagatagctctgcctttttcccccttcgatagatgccttttattgaataattagtcttcaagccagcaagttggtttcattgaaaaaatgataagcagtgtagtaacaaacttctctttgccttttgcaactgacagttgataaagcagttgtccgtgccattattaaatcctacacatcttacaattgacagtcatccactgttcttttttggtggcacagtatcgattcgtccctcacaagtgaagaaagggagcagaaacggaagcaagccagcgtcagagccacattcgtgcaagacctgctgctctctactctattcggggactaataaatcaggatgagccaagttatcactggaagggtgcttcccggtgcaggtctgcagagactagcgtgctccacccaacttgctgaattcctcgacggaacatatgcgcgcatccggggtgctagcctttcgtcccttccagtgtggtgcagaatcgatgtgggcatgatgtgtcttctaagttattgtaagccggtctctctatcctcagttccttcataactgacgatcagcatgtgatatgcatgcaagtcgcggttgtgcgtgtacctcatctgtgtctgaactctgaagcattggtttgttgtaccaacataataataataatgttacaacagcggatggctatacatacactgcagcgtgtaggagcagattcaacgaattccgaaactacaacgcatgactacacactgcactgtatagggagcaattaacgagttccgaaactgtctagatttggatgtcgttaccgttagtccatgtgcgccagaacgacagtgaaagagcgtctctaatggtgtttaaatcgctggctatttgatttctaggaagaatgttattagctttcaatagcaatttgtaaatatttagcttagaaagtcgctagctattaagaagtcgctagctattgtgaagaggattgtgagagagttatttctaaaagatcgtgctagactagctatattagaaaatcgctagctatttgatctctctcctcgatccaatgagagtgctaatttttattattatttttatacgtcatctcgctagctatttgtaaagtactattgagagccaatagaatttctcctagcttgctatttgatagccattacggataagaggctgatatgaaggtctatgcactactgtg

SEQ ID NO: 4981 - DNA, 7499 bp, Sorghum bicolor
  misc_feature (1823)..(1922): n is a, c, g, or t
ccttgttcgtttcaacctctatttagtagtatttttcttttacaacaaatcagccaatagtattttttgtctgacgttgttcatttagctgataagtcatgacagaagtactgttggttaatttattttaaaaaaaatactgctaaatgtctggtagattcgactaataaaatcaaacagcgtaggcacatggcatcttcctcggaaaatatcctgctctcatgttcgattttgctctacggttctactctctcaacaaatccatcacgtaacaccaagtaaaaaaaaaaagagcagctcgcgtcgcgccaggcagagcgcggcggtgacggagggcataacagaacctgaacacaaacaaatcgagagcgagcacgtgaaaggcgacgcgctgtggcgcccgcgcagccccgtgttccacttccaccacctaccttgatcctcctcggtggtcggttcctcgcagagtcgcagccgcggggacgcggggaaaccaggcgctagcgtcgagaccacacacacacccgcgctgcggtttcgccgtccaccccttttgacttttgacggacgggctgcggcctgcggggcgggcgaagtcgcgtgaccagagaaaggaaaccatcggcagaagtagaaccacgtgccgcacgaggccgttgggtctcgcggcgacgggagcgtttctcgtgccgttgcgttgcgtggccacggcgccggactctaccggccctggctcctggtgcacgtacgaggcgtcgaggccccaaacaagacggacgtgcgcaccgtcgcgcttatccggaagggagaggagaggtcgggggccaaccttctcttgtcgtcattcgctggagcatcatgctacgggtctaaagcgacatgaccgtagacgacgatatgtgtggcccggcatgtctaggccatacccatacgcaatgacgcaacgatctcatgttcatcttccgttttttttttttaaaaaaatgttcatcttcctccccataatctgacgtcgttactggcttctggcgagtggcgacggacaagccaagcggtgcgtgtgtgactaggacagaatagaacgaacgaacgaacgaacgaccggccaatgtggtaaagcgtatttgcacaggagccacttgcaaaggacagccaagaagagccttgtagaggaacgaagagcgagtggcgtccatatctagagctcgtcgccatcagagaatgcccttttctgtgaggtggaggatgcgacataacatactacgtagtacgtactggatacttatgccagggcagggatgattcgagctggtggaatcatgatttgccgtgcaagcaagcaaaaacgatttaccgtctcgtttggatcctgcgagaggacgactcttgccctgcaggcacacgagaatgagacctaggccaaaaagtggtagcaccgtgccaccttagctcggaatatataggaactaacgtggcacgacacgatcatcacaaaccatttgagttttgacacaggaatagagacgaacagataagcacagcgctaaaaaaagatggccgccgcgctgtccgagccccgattcaaaagcggccgagacagaaaacgtgaccacgggattgaaatcaccgcatcctttttgtccaaaaaaaccattcaaaaagcgaggagacaacagccccccctcggtctattttttcttcttctctataatgccccgttccgtccctgaaaagcgaaaagctcctcgtcgtgcttataaatacgcaacccgcccgtaccgtcgcccccttccgccgatggatcctctcctcaagtacaaggnnnnnnnnnnnnnnnnnnnnnnnnnnnnnnnnnnnnnnnnnnnnnnnnnnnnnnnnnnnnnnnnnnnnnnnnnnnnnnnnnnnnnnnnnnnnnnnnnnnnccccccccccccccccccacacacaccggatacgaccgcctccaccaaccgattccgtccaactccccacctcgtcaccaccaccggcctcgctcgagcgcgaggcttctctccccgcgcggattccgccagctcccgcgcccgatcgcggacccgtcctgctgaggtgatgcttcctgaatcctcgcgcggctcgtttcccccccttcctcgtcgaattgtctgggcggcgggtcagctcgctgtgctcccgcccgtggtccgtgtgactgtatctgtgtgcgcgcggtgggccggggaaggaatcggatccccgagcgccgcgattcgggccgcgattgggcgtttggttagctgctcggagctgtctgtgaggggtatcgttcgaacgccctcaggcgcgtttggttgggggctggggagcattcctgctgcaaaaccgcgccggtcgcgggaagctactggtgacgagattttggctgtcccgttcgtgcgtgggttatttatttattttttcagacggaggattctgtgctgtagctgtgtgcttcgctcgatttttagtgcatcgaagctcatctcagaattcggaatgtggactatcgagcttagagtcaacattgccggtgatggagcagcagacttggacttctggtggatcgtggacctatatggtttgaaatttgtgctgcgtagtgtgtttatttttttttttcatttggggtggctgtgcagattgagactgtactaaccacggtcagaataagcgttaggtagacgcggagaattttgcttgggaatgagaaactcttagactcttagttgaatgtggtcaggagatagctgtgctgattcattgtcatgctcatttctgattagcaatgatacttggttctaaaggtcaggaaatgacttggactttaaactgttttatctgtggtttggagaatttagttactgtacggtactacgttctttgttttggtttgaaaactcagtagttttcagttattcggtacttgggcatagaatttttcagctgctagcatgtggatcttggtagtttttggcgggcttttttagggtcaacagaagggaaaggcttttcctacctgctatattgcactggaggacaatgcaaattgctgcacaagcacagctgagcttacaacactagccgccaagagtttttgtcagggttgtcgtgcttccaatcatatatccatatagcctcttgttgaagttagtgtcattaatatatccttttgtcgttgctttagatttatgagactcgacaacttaacttttcaatgtaagttctgtaacaagggcacgggtgggcagagaggaacagaaacggcaagctccaagaaagtcgcaaactcgctaacggacgagtaaataaatgtgctacattgctaaatttgtcgagcccatctcacataaaagcctctaatcttcttaaataaggaaagcgacagctaaatcttttagataagacaagttattggcgttaccaatcaatttattcccaaccatgggatctcaatggtcgtaattgttatgagttgtcataactttttctgcagcttacattttgccgtttcattatttggacctatgccaataattactcctcacctgagtcaaacaactcatccttgagtttgcgatggacatggttgatgtgaggttatgatgtccgcacaacacaacacgagggaaaccaaaaaataatttatttgttgcttttatagtactcttccaccctctttccactatctcctcctttggcaatttcgttcatgatgggccaaacttagatcggcctttgcattgtgtcatgtcgtttgtttgtaggtgcatggagcaatgagtgaacacacccagcttacttgaaactctgattgctaagttcttttctccttttccccattctacccctgcaatgtagttccgatttattttcattcttcccatgctaccttcgctaactgcatgaatttctctttagcaactgtttaagtttttatgtactggagtgcatactctcttagtatgtgtttgaagcttgggatttgttcagaccaagcatttcttatccagtggtccatattgtaattgtaggatttacacgtcacaaactagatacattgcatcatagccagcttagtaattaacatcactagagaggactttaactatgtggaagtgtagtaatcacaaactagacacattgcatcatagccagcttagtaaatttttttttttttgcgagcaagccagcttagtaatgaacatcactaagaggactttaactatgtggaagcatagtaattgactacaggaagattttttttgaaacaagactacaggaagattgaaaacaatagaaactagttcaccaggtaactgtaaaataggctttagaatatcaccccaattgcatgttgcaaggttgcgactagtcgtcacttatttatcaactagttgtacactgtagttaccattctaccaagtgatccagaccgtggttgcatctagaatttcagatttgcggctcgttggtcgggtttggattgaagctttatattattttttcttgcctcattgtaccataatagcactggatttggaatcctgcattcatgtcaaattaatattgccatttaaatcaaatcacgccgatgctacatagttggatcaaaagatatttttaaagaggaaaatgtgtgtaattgcacagatagatgggacatgagagctcaacaattattgtgaggctctctagggttatgatgagtaagagaagtggacaaactggtgcaccgctatactatggctcaatctcaaccacatggttttcacttgcgcacacatggtcattaggcagaacatggcccaaattccaattaggcttagactatggtgcctcttttcccagcataagttctcactgcctctgctgctcctgactccaatgttattccaaattgcagcagtgggaataatgcttaggcaccctatctgcacccctggaccctggtagatccactcttgctcagtgcagaggcctagattaatgcaaaattttcatgtgacataaacctcacagcttgttttgctgagtcttctattcctgccttccttgttgacatttaaatacttcactcaatattcaatgttattcgccttttaggcgggaagttgtatcgtttcttttctaacataaattaatcccacccagtcacctgtgagagtaatgcatagctgtaccttggttgtattatgtcataagtgtggccccccattggtgccaacaatttctcatcaattaccatactcgcaagtaattatgcatagcttgttatagtgctgattcgacatgtcacttaagatgcaaactccatctgccgcattccaacttgaaccagctatactgtggagatctaacaaactgaaatccgatacagaataatgcatatgaagctatgagctaatctgacaagctggtgtcttgcatggaaaccgcgttgtagctacaacagtactacagtatcgtgctataatacttaccgtctggctgctgctgatcagtcttgcgcgcatgactgttactggacaaataaatgtgcatacaaatcataaactaagagacagccttgttcttcttcttcttcttcttcttcttcttattattattattatgaggagacggccttgttctgacaaacaaatagaagatccgtcatttttgaggtgcaagatataatggcgcatagtgtagggccaatggtactgaaacttgaatcacagattatatatatattttgcaaaatgttgtttgagacaaagtgttagtgccttcagtaaacacagtcctcttcttcatataactgatgaatattctgtaaggttgtggatcaagttatcaaggcctctgcatatcaacaggaattaaactattttacgtttatcttatatatggactattcaatatcttctgctacctaggcccagtcacgtgcaagtttcttttgtcaatattttgctcccacttgcaagcttcagcatgtactgggaattatcttgtctgctatcatcatttacttaaacgagacatgctttacatttttcatctgtacttatccatattagattgaatgctgaccatgtttggtcaatctcgtttgcagggagaggtgatgataaaggatatttgctgaccaaacgtgcagtagttcttcttaaggaaatagaaattggcctcatgtcacatagaaatatgctctggacacatcagtccgttaatcctgaatgggagcaaggacatgtccaagttcaaccaggaagttcctattatgcaggcacaagtgattcatccaacctgggcatgcaagttgctgttggaattccaggaaatacagctaatgttggtatatgtgatctgcggaatcatgagcgcccgcatgttcataattcatacccacatgccagtgttacatcgagatttgtcttcccaactactatgtacaaccctagcatgtcagcagcagctgtcaacatatatattcctcagactcaaagctttggactgggcaatgtgctatcaccatctttacataatcatgtttccacaggaactattgatgaaagtagcagcagtgtcaattttggtgatagtgctattggattcatgaaaaggaaaaatgcagtagttgctggaaatcatcattttcttcatggatttgctggctcaagttcatctgttcatgcgcctcagaatcctgtgcgcggaccatggaatgcttcatctcaatcaaattgtttacccggttatgctgcttcaaacctaccagaataccacaatagcaatgggtggccattcttagaagaatcttctgcagatgcttcaaattgtttcagttctgtggctgctcgcccagagttggtacctcatggtaactatttatatccatctcacataagccagtgcaatacatgggttccacaggctgcaagtcatggagtgccacagtggggatatagtaatgccatggtcaatcctccaggttagttctgaataaagatatattcatctgatgttttgctgaatgatgaattaaggaatcatctcacagtttccaatttatttgcattgacaaaatagatgactatttttatcagctttgctgataagattagcagtaaatttctgctgtcatgtatttgactggccattgaatgtaaatctttgtgtgtgagatttagttttgtacttggtaactcttgctttgaacttgtcttgtttgttcatcaggaaccgcagacatgccgaatggaaatattcaggattaccaaactggtcattcttctattcatgggccactacctcttttctgccagaatcctttgcatagtatgcaagcacaagcacctcaaatacaagtaccccatcaacagttcgtcggtaacaatgtggtgcatggtttaaatccttctgccgttggccatcctttagatccaagaattctggctctcccatttaatgctgagcacacttttgggcatccaatg

SEQ ID NO: 4982 - DNA, 2899 bp, Sorghum bicolor
ctacggtgtcaaaattcaaaaagttttttgatctaaacaaagcctatgcatgcagcatgagctttttttttacttaaatcaagaaaaaaaagaaatctctagcctatatggcaaagaaagacgagcaaaattgaggtgaagccaactaaggacagggatggatagctgttataacggctagaacattagggtctgtttagataccatcaaaaatctaaaaatttataagattcttcattacatcgaatcttgcagtatatgcatgtagcattaaatatagataaaaataaccaattgcacaattcacttataaatcacgagatgaatcttttaagcctagttaatgtatgattaaacaatatttgtctgaatgtgatcgtgtcaaaattaaaaaaagatttgaatctaaacaaaaccttagtttactctgatgattattggtgcacgggccggggcttgttctgcctggtgcctgccctgcttatgtgaatgtgatcgtattttactataataaaactattgatttatgtatacaagttaactgtagctagctgtaaccttaaacagttcctgattgatcagtttggatgcagactgagctgtcgtgggctttggactcgtgcttcgcatgttctatagaaattggagttaacgatggaagtgaaactcgatatagtacaatagtagtattcgtcagcgctccaacggtacgaatgcttgtgcaacgtacgtacaggttggctgcgtggagctgaacgaaaatgaaagagagagagagagagagagagttctgaaacttctagaaatctgtagcccagggcccaggcccagctgaagttaacaaggtagctactcccatccggccatccccctccgtcttaaaagaattgcacatgttgcctctccgtaatcaaatagtacttattatatttaattagatttatataaaatattatcaacatttctaaaggtctattcgcttgaccgaaaagttatagctgaaaataatattagctaatttttgtaatagaaaaacatgaccgataaattctgcagataaatttaagctttaaataaatttattgtataaaatatttcatgatgattgcacatgttgcctccgcgccgtggcgccgagaagagtctcagccgtcagccgtgcagcgagtcacttgcgagcctcgtggtgtgggcgtagtcgtagtactactgtaggtctcagctccctccggctgcacggactccacgcgcggctgtcacgcttgccgcgcggcctcacgagtcacgacacctgctaatgaatagcgcgacacatctgaacgtgagaagtatagtaacagcaagtcgtcaggaacagcttacagctgggcatcgccatcggcatcgcattcggccggccaaccgaggcatgtactggccgcgcccgggtgagcctgcctggctgcaagcctctttgagccgttgtgggtggccatgccatcggccagcgcggctccagccgcgcggcgtccggtgcaagcttcgcgttccctggccgtccgttttcaattccactggtggtgcagacctgtagctgtatggagccgacagttgtaaagcgtcgccacggtttgcaaattgcaactcccaccctggttacgttttggttccacgaacgagtccctgcactggtgctggacttgctcgctctccgttgcatagctgttgccttgtacacaaagcaagcaaagccaaggagcgcgtcgcaacgaagcagaaactcagaggggccaaaccgtcagaaacccccacctccgtcgcctccccatatatcccccggtcttctcgtcgtccgctccagtcccggcagcacgtcgcctcgcctcgccacaccacctccacgtctctgtccctcccgcgtccgtcttcccaaccaacccacccgatctttttccagccaaaccaacgcacgcacaccctcccaagtcccaacggcagcagagcggcggcggcggcggcaaatggccatcgaggcggacgcggcggcggtgacagcggcgagggcggtttcggagacggcgcccatgtccccggccgccgagacggcggcatcagcggcggcggcgcgcccgcgcgggtggctgaggaagctcatcccgagagactaccacctgccccggagcagccggcgctggaggctggccgccccgtccgccgccggcgcgtccaggctcgcctcgtcgctgtctcgctccctcaggtggaagggcctcccggggctctcctccctctccctccgcagcggctccgcggccgccgtcgtcgacgccgtcgcgttccgcgtcatgtacgtcgtcgaggccgtcgtgctcggcctcgcgctctcctgcttcttcctctgctgcggctgccacctctaattaagctgccgcttttcttccccccttcacttcaccaccactgctcggctgttggcgtgtaacaaatgaaatgaccatcgttttggttcttccttcgatcgtcttcctgtaaatttcctaccttttgctattggtaaaaaagaaaaagaatatgaaaatttgcgatgcctactgggtgttgattagtttaattcgcgtgtgtttggatgctgtggatgactggatgcaccaaattgcgatcacggaaactgggacccagtgagttcttgtttgtttatgcatagcatattgtgtcgttgtcccggtaaaaaagcaagagcgggatatattgcaatccaaccaaccaaaatcgaggcgactcggctagcgagcagctccggagggggggatcatggaggaggggcggaaatcggaaccggcggcgttcggtttcccggcgccggtgcagccgggggcgacgcgcgtggggtggatcggcatcggcgtcatgggcggcgcca

SEQ ID NO: 4983 - DNA, 7568 bp, Sorghum bicolor
tgactctctctgttaataatataagagaacagataatggcatttaaaggaaaacaaaccacaggggagatgccattagaaaaatatgaatgatttggtaataccttggggtagtaagcaggacccagagggagctttgacaatatccactccttgatatcatccaccccattaccaaatttagcacttattggtataacatcatcaacattagtaaatttttggtaccactgtcaaaagagttccagaaatcaataccaactgcatacagaggaaagcacaaaggaaacagggaaacacctttcaacaattgtatcaggttcatacctcaagtttctttgcgatttctccaggttttatgagatctttcttgttcaatactagcagtacaggaagtgcaatatctttgtttcccacaccttcttcaagcatttcatcaatctaaaagctcaaagcttacaagaagtaaggtaaaaagaaatggttgaatgtcagaaggatcgattactttctttcttactggtgggtggtggcaataccttttcaggtgctttgcaagcatcagcaacaacaagcacacagtccgcactgccgatagcactcctaacattcttcatcatcatactgtccagcttatgcatctcttttttaataacaccaggagtgtcataaagtataatctgcaaactaaatgatatctcagattagcagtgaaaagcaacatgatccccttgatgataactgggtccagaaacttgtgaggaccttaatttgcatttgcattgaactgaattaaattctgatacctggtactctggttcagaacatataccaagaatgcgatgccttgtcgtttgcggtttatctgttacaattgaaagtttctgaccaaccatttggtttataagggtgctcttgccaacatttggtttccccaatacagcaacatagcctgaggagacaccgtatcagtacgccaatcatttaaatgtgcatcaatttcctttctggaattttgacgaaaatgctctgcgcattgcaacttcgcaagctccttaattttactttacgaaatgcatgacctcaattcctaagcttaatcaatacttcctcttctgtccctaaaagcttcaattcctagagttgtcttaggtcaaaccttttaaactttgaacaaatttttagaaaaaaatgctaagatttatagtattaaattagtaccattgaccatagaatatattttcataatatactaattttatatcatagatatattgatgctctttttttaagtttgactagcacgaattttaggaattgaagtttgcagggggctgagggagtactaaacccgactaatttcaaacgcagaaagcacagaagtgagaagcctaaccgctgcggtgattggcgcaaagagaggtgcccaattcctccgactcgtactcatccagcagcgccaggctccggtccggcttctcgatgagctccaggcgcggtctcgtgctcactgccggttcagcctcctcctcctcctcccccacttcttcttccaccatctcctcctcttccactcctgaataggtcagaatcgcattgcacacagccccacctccatgcttcagtctcgaggcgcggacgcgtcttccccgcagcacacacagggaaataaaacactgtggaagggaaagggctctacgggagagacacggcggcggcggcggcgccacgagccggagcgcgaggccaagctccatcccgcgagagtgcagcagagtgcgcagtgatgtccgcgtgcgtccgccattggggataagggaaaagagaaggcgggcgacgagacgttttcggcccattttcagaggcccataaaaggacaaaggcccaggcccatgagccggtcacggcctacccgccacggagggacggagccctcccgacaaaaacgacgagagcagcaaggcacctaaccgccgccggagcgcggagcaaaaccatctccaaaaccctagtccccaacccctcgctgggaagtctcctcggcggcggcggagatgggcaaggcgaaggggaagcagcgtcaggacaagttctaccacctcgccaaggagcaagggtaccggagtcgcgcggcgttcaagctgctccagctcgacgcgcggttccgcttcctcccgacggctcgctcggtgctcgacctctgtgccgcgccaggagggtgggtccaggtggccgtcaaccatgcccccgtgggagccttcgtcgtcggcgtcgacctcgtccccatccgccccatccgtggtgcccactcgctcaccgaggatatcaccaccaccaagtgccgcgccgcggtgcggaggcttatggactccaacggcgtctccgccttcgacgtcgtgctccacgacgggtcgcccaacgtcggtggtgcctgggcgcaggaggccacatcgcagtcggctctcgtcattgacgcactgcgccttgctaccatgttcctcgctcccaagggcgccttcatcacgaaggtaaaggattctatagaagaagaatgctcaatgttgcagccattggcttcagtttgtaattaagcatgatgtttattttccttgtaatatgtgaatgcaaaatatctttgttgaaaacacactataaaaatctgttctaaatgagtagcagcatggtatcttgacattttcatccctaggcaggtgcaatgtttatgtatatatatgtgctccttggttcacagttaagtagtatccattcttctgacatattgagtggttttgacagtttataccttacagagttgtcatgtgttttattattaattcatctctttagttattgaatctgctttactttcgttgttctcattgtctcacatttcaatccatgtttaatcaactgttctttttcttcaacaggtttttaggtctcaagattacaacgctattatgtactgtcttaaacaggtctgtattcattaaatgttttgtaatatttttttatatttctcgtatttggttaattgaaacttcaaatatcatttcggcatgcagttctttgagaaggttgaggcgactaaaccttcggcaagtcggtctacatctgctgaaatttatatcatctgccagaaatacaaggctcctgcaaagattcaaccagaacttctagatataaagcacttgttcagtgttgttccagaacagaccaaagtatgttgagccacttgtctgaatcatctgtctagtttcttttattctttttctgctagcataccttgattttggaaatgttttgtgctctgcagtctagggatgttatggatggtaggaaaaagagacaccgtgatgggtagggccccttttcacaccattgctggagtttgcctgcttgttttctttttccccttctgaaagaatgcaacttttttatatctataattgttagcatgattagcagtgttcacatcatagttgagtataatgttctacctatacctattctcacattacatatccacttcttaagatcattataagtttataatgttctacctattctcatgttacatatccacttcttacgatcattataggtttataacagcctgttttccaatatccttattctgctcacatgtaaagaagtgcattgctcttggtattgtgaaagtttatgtcgctctgttatttcgtgtaagcaattgagatgtttgttctcatcatttcagcgtttttttaagtcacataatcagttaggcatttcttgtttgagccagaaaactgtgcttttctgcccttgggtaagcaatgaacaagaattaatagtttgtgaatttgttcaacaaaaacatggtactcgagttcatgtatggtgcatcgctgagtgtttatgttcataacagtgagtgggtgggtgtttatgttggttcactgcacttaaggctgcaattggtgaagttgtagctttaagtttttgttacacgaagccctctttggtgaacaatatgacactagattgttatacactgatatcactaacttgtatgtaggtatgaagaagggaatacgacattgcggaaagtcggtttggcatcagactttgtatggtctgatgcccaggcgccactggagtttttgggctcttacaatgcaatttcatttgataatccagaatccctgcccataaaaaatcatgagcttacaacagatgatgtaaggaactgatgcctttgctaagcatactgcacagcttatctttccatctattctagtataagtacttacggttgattgtttggtttgtgccagataaaaaatttctgtgaggacttacttctgttggataaaaatagtttcaagcatatcttgaagtgagtaccttatctaccattctattttcccatatggtttatttctgttcatttaaatagttatgataacccaaacaagtctataagtcaaggtgtgtggaggatataaatcttgtctatttgcatgaccatgttagatggcgaattcgcttacgaaaatcactgtcagcgtcttcacaagtcaccccaaaggtcaatgatgctgtggagaacacaaaggtcacagatgatgatgtgcttctacaagaaatggaagaattgaccagtgtcatcgatagaaataaaaaaagagagaaaaagcgtttgtcaaagcgtcgagcgaaggtattatgaaatacatatacaatttttgcaatatgatgatttgacatctatgctgacatatgggtctcttcattgcaggataaagcacgcaaggccacaggaatgcagattgatgctactggagatgattatggcgatcctgacttgttttctattagtgttattaaggtatcgtgcttttttctgtggtcatgttatgtgctatggttacttagtggcatttcctgtgctcagaatttataccaatagctcactggaagagctttagttttgcatgatattgaacttgttttcccatcattccttagtaaacagcaatactcattttcctctcctgagtttcctccttgtcctgcatgcaataatttctaaatgcggcagccttcatttttgcaaaaacacaccaacaaatttgattcactctatttggatttctgtaaagtaaccttctaatgggctgtgtatgtgctatctttgcctgtggtttgttgcaaaagtatctaaaagagcatgctcgttcatgatcatctaattcttaagtttttatattcattttccttttttagggtggaaaacaacttgaagctgttgaatcagcagagcttaatgtggaagatgaaattggagacagtgagaatgaggatactcaagctcttgaagactctgatgaggaaattgattctgatgaggaacagcagaggtaattttttgaacatccacgccatcagaaagcagaattaagtgatcaaatatccttatccttatatttctaaaaaaataactgtaatgtcaaaagtttgtaagtaatcattgttcacatcaggtatgatgcccagcttgaggagatgcttgatgaagcttatgagcgctttgtaactaaaaagggtggtgaaataaaacaagaacgcaagcgtgcgaaacgaatcaatcctgatgctgatgcagacctgttagaggtaatacagcagccaaagcacaggacttgtacaatgctatgcaatttatttttctatgttgcaatttacaatgatacagggtgtaaagttttaagatctcgatttaggtttcaataatagaggttgtaaagttttaaggtgatatagatgttcttattatcttttaatcttactagggaggtgaagatgatggtgatgttgaaatggatcaagattttgatgaagatcaagatcaggagaccaatccccttctgttatctctagatgaacagaggccaactaaagagcagattgtaaagcaatggtatagtcaggatgtgttcacagaagctgtaaccggcgttactgagcagagtgacactgaagatgaaagggagagtttgcagaggaataagaagatggatactggcaaaaaggaaaaggtggctaaagcacagcgtttgcaacaagaagattttgagattgtaccagcagaacctgtccgaaacgaagaggattcatcttcatcttctgatgaatcagatcaatcagaggatgatctcgatgattacagaaaggctgaagtactagcctatgctaagaagatgctgaggaagaaacagagagagcagatacttgatgatgcttacaacaagcacatgtttgatgatgaagggttacccaactggtttgttgaggatgaaaagcgacataggcagcccatgaagcctgttacacgtgaggaagtagcagcgatgagggctcagtttaaggagattgatgcccgtccatccaagaaggttgcagaggccaaggctcggaagaagcgtgttgccatgaagaaacttgacaaggcacgccaaaaggcagatgctatagcagaccagaatgacataaacgagcgatcaaagaggaagatgatcgaccagatttacaggaaggcgatgccaaagaggcctcagaaggagtatgttgttgcaaagaagggggttcaggtgagggctggcaaagggaaggtgttggtggatccacggatgaagaaggacaagcgggccagcgggactgggaagaaagggaagaagggcggcaaaggcgcaaaggggaagggtggcctgaaaggcatgagagggaaagctgggaagaaggctgggaaagccccgcggtaaggaagctgaaagctggaagctaaaagcatggctggaatgctggatgcccgcctccgtgctaaatttttgtctcgtccgactacagctactctgtaggcagatgttttgaagttatgtgatgataaaagtttatgtgttcaaagttttttagcgtgggttatcagtggctataatttgtttctaaactagtggtcactttgagtgtcactaagcataatttacacatttcacaatcaattatcaaaacttttagcccccttggggactccagggtacaggacatacagatgcctgcatctctactaatatttgtgtgacgcacgccggtggagacttctttttttacaattgaggaactgaagagttctccgttgtgtcgagatgggcgtggtgtgtctgtggctttggctgctttggactagataggcgactttggctatgaagttcctctggaatccgcttgcatttccttatcagatgaaaagaatgcggcactttgaatcccaaacattgagatgcagagaccgcctggattcgcattcgtcaagttgacgatcagagtagaatctgatccaagcttttttgcgttcaagatttggaatcaggctgatgcagaggtggccactgaatccgagctacttggtcatagcatcaagcagctggccagataccaactaatgatggctcagctctaagagaatataagcagtgagcgatggctcacagtcactgcaaaagccgctattgttgtagtgcttaaaca

SEQ ID NO: 4984 - DNA, 7020 bp, Sorghum bicolor
tccccggaagagtatctgcaaaaaaaaatttcggtctacacttgtcaaaaaccacttcgtttcgtgttatctaaagtgtccaacataaagccgatgctacagttaataacaatgaattatgtaagttatcacccaacttagaccagtgaacaaataaatcatctatggtaagaggaggtgatattccaaacattaaatgtacaacacaccacaaaaatttggcataaaacattccaaaaagaggtgatgaatagtctctggagagtgacagaggttgcatcttgtatcaccattccaattacgtcgagcaagattatcttttgttaaaatcatacctctttttagttaccacaaaaagatctttatttttgtgggaaccttgagctgttatatatcttgtggcactctgaaccctcattgttaatcaacgtagcatacatagaactaactgagaatctacctgatgaatgtaaagaccaaacaaaaacatccctttctccctgtaaattcacgtcttataaagaagcaacaattctatgccaatcctttaggtttctccccgctaaattacggcggaaggagatgtttaaagggacggatgtaagaacacttggcacttagtcttgttttcttctcataatattgaataatgatgggaatttatctttgagtggtttgaaatcattaaccaacaatttacccaatattttttaattgttataatacaaattcgatgcggttggatttgtaattaaacaaactatccaactatcataaaacttgtaagtattaaattataaaataaataaatcatgttttgttttatataaaggaatagaccggcagttaggcctatgcttgctttttggagctgtgggttaccagttttcactctatacatacggtgtatgccaaccaaacggcgttgagctaacactaacagctacaagtagcagaagcaaaaataataatataaaagagccctcacccgtaggtcatgttgatcagatttggatcgcatcgctgtcggtgagatgtccggtgttgctgttgttgcatcccgatcagaactgtggctgtgggtgtagaaaatccggcatgcaacacgtgtttccgttccagcatacaatcaagggaacaaccaacccggtagtcttccgtcagggagagggagggagacattttattagctgtaccgtccgcgaccacgaggcacatgaggccttgtttacgtgaaaaagattttggatttttctagggtagcactttcatttgtttatggtaaatattatttaattatagactaactaagattaaaagtttcgtctcgcgatttacagtttaaactgtgcaattagtttttattttcgttaaaatttaatacttcatacatgtgtcaaaagattcgatgtgaccggaaatcttaaaaactgtgcaattagtttttagtttttagagtgaacaaaacaaggcctgagtacacgacggacaacggtcagaagaatagaaacgagaaagaaacactggctttttcttaaatggtggtagtagcttattgtcccatacgaatctgacgtggctgcgagcagctgctcgcccaccagctaatcccagcgacatgcgtgggctcttcggacaaggacttcaatacagatacagagttgcagcccagtctcggtgattttgaaagaagatggggaaattttcccccctgaaaatgactttagagcatgcttgggagtagaattggttaaggacactgtggcctactatgacaaaaatatcgacaaacggcaaaaacaacacggccaacatttatccgttcaaagatgaacgtgtgcatgatgagctgaaagtcatgtccagctcagctgagggaaagagcaaacacttttgggaccctgacgggtggggaccctgaccgagacctgcctggcacgacgattcgacgacagccgcactcccaccaacggaacgaggtgggtctcgctcctctcgtcgcctctcctggcattcgcgtcccactcccacctagagcaaaaggaaacaaatcaaatctcgccgcgagctgggcggcgagcgagcgcgcgcggcgcggcgccatggcgagcaacagggcatccggcagcgagtacgagagcggcagcgaccacgacggcgcgctgcagaagccgctgctgcccaacagcgggagctggtaccggatggggatggggtcgcgccagtccagcctcaacgccgccggcacctcctccatggccgtcctgcgcgagtcccacgtctccgccttcctctgcacgctcatcgtcgcgctcggccccatccagttcggcttcaccggcggctactcctccccgacgcaggccagcatcatccgggacctcaacctctccatctccgaggcacgcccctccctctgcctctgactttctactacgtttctcgctcattctggtttcttcttgtctaatactaattgaccgcgccgccgcgcagttctcggtgttcggctcgctctccaacgtgggcgccatggtcggggcgatcgccagcgggcagatggccgagtacatgggccgcaaaggggtgagaaacaactctgctccttttatttattcctttttcttctttgtttgcattctgctcggcgagttgggagtagtatgcgctacctgctgattgaaaattaaagcgcgctagttttctgtcggttgacgcctgttccgaatttgttgtgcagcttcgctaaatcggattatgaccttagtttttgtgctcaaataaattcgttagatatctttgccattgacatggtcatcatcaatcatacagttgggcagaaaagacgtgactgatatatattgtaccaaagtcctgtgtttatttacagttactttgactgaaggtgttttcatcaattgaagagatgttctgcgctgaagttgtactctttttcactaacagtaactggcttgctaactgttttgcagtcgttgatgattgcagcgattccgaacgtcattggttggcttgcaatctcctttgcaaaagtatggcacactattgtgtttcctttgtttatttcaacattttgcttgacatatgacaacattaggcttgagcttgatgactgttggtgtctgctttacaggactcttcatttctgtatatgggacgcttacttgaaggatttggtgtcggtatcatttcctatgtggttagtataataaaactccatccctgattattttctgcataggagatttatggcttgagagttagggtacttgtggtgtttaggctgtacaaatgagaaaaaaagaacaaaatcaactgagatatcaacatttttgagatgaagtgatctatccctatggagttatttttattggcaaaacaaccacaatggaagcatggaccggttgtaacaattaattttgatctgcgaatttcgtggcaccaggtaccagtatacatagcagagatatctcctcagaacatgagaggggctctaggttctgtgaaccaggtttgcttatactcacaagcatcttatctatttgtgaggttgaggtaaacacttggcttgtttatgcggaacttattgtgcacttgttcattctacagttgtctgtaacccttggtatcatgtttgcctatttgctcggcttatttgttccttggaggcttcttgcagtaataggtaatgtggctatacactgatacactaatgggtctgctgtttttattgctgttagtttgcacttcaattctgatatttcagctcgcatgatcagcagcagcaaatgatttgaaaaaaatatattgaattctatatattaggcaaatatttttgttttgaccctatctgagataacctttttcctaaaacgtgtaatgccatacttgtaggaaccttgccctgcatagtgttgatacctggcctattcttcattccggaatctccaagatggctggtaaatacatgcacaagtgggataatgaactctgaatcatcgtgtcaatcaaatttccaatggacgtttcttccacttatatttctaggcaaagatgaatatgatggatgattgtgagacttctctacaagttctgaggggattcgatgctgacatcactgcagaagtgaatgatataaaggtaagcacttccttttattcttagactgactgaatatgatgtatgtgaacaatctaccctttgagtatcattatttctttaacattgagcacgtggctctatgtacttcattattaagaaatcagtgggattaacttttagcttttctccccattatgcagagagcagtaacatcagcaaacagaaggactacaatccattttcaggagttgaaccaaaagaaataccgaacacccctaattgtaacttaacattatctgcttatcttatacctagtcagtattcacattttgtaattggcagtttgtgacaatgccacaactttttgcagataggaattggtctacttgtgctgcaacagctaagtggaataaatggtatactgttttatgcaagtagcatcttcaaagctgcaggtaacctgtgcacttgtccactggattgtgatttttattacaagttgcgcatataagttttaggcaagaaattttgaatatcttgcaaatttaattggggcattagagggaagtgtttgctagataaccaacataagtatcttattggcaatatggaatatagtggccttattgttcctaatgcattataacatgttcagaaaagctaacaagtgtatacccttataagtggtaacatggtttaacattttcctgccttggtgaatgatgacttttcattgtttatatcattgccaaagcaccgtgtctctatctttgcctacaacattgctagttttagcttttaatttaacaatcaagttcttcaggtctcaaggacagtgacttggacacatttgcacttggagctattcaggcatgtgaataataactaagactgacttcatctagtctctctgtattttattttaatcttcttacccttccatgattccatcaggttcttgccactgttgttacaaccatgttcttggacagagctggtcgacgaatcctccttattgtaactaacttctgcttccctctagtgctattatctggtaggttttctgtagcttagtttaatttctacttcaaattgcagatttcttctgctgggatgactataagccttcttgtagttgctattgtattttacatcaaggtatgattcaggttcctttgcaataagattctgatgagaagatagtagttcttctgaacactttgcattactgcagtacatggtttatggacactttgatatgcagttgttgcagggtctcccgtctgatttcactgatgtatttttctttcttgtcatggtttatttgtttcaggataatctttcacatgactctgacttgtataacatcttaagtatggtgtccttggttggtgtcgtggtaagtcagtcaattacatttcatctgaacatttgttttagttgtggaatgtgtgccgtgattttgtgctcaaatacttcgttcaggcctatgtcattgccttctccttcggtatgggtgccattccttggatcataatgtccgaggtaaagtaccttaaagcatagcgaatacatctcattagatgtctctctctctttcggttttcactgaagagcactgttcatatccataattccataattttagagcaagtgctcttaggcacagtctgtaagcaatctgaaggctgatttcaaaactttgctttttgtagatcctcccagttagcatcaagagtcttgcaggaagctttgcgacccttgccaactggttgacatcctttggaataacaatgacagccaacttgctgatcagctggagtgctggaggtccgtatgggtttgtgcttatctcgtgtagagtaggatcatatgtgaactatcagaccttacacaggttacctttgtttccaaattgtacaggtacgtttgcctcctacatgattgtgagtgccttcactctcgtgtttgtaatcatttgggtgccagagacgaagggaagaaccctcgaggagatacaatggtcattccgctgagctccagcgtcttcaagatacgaaatggttcttcacgttttgttgctttagatagttttaatatggttattcatctgcaatggttcttcaagttttttgtcgctttagatggagaacattgattcacgtaatcagtgttcttggctattctttcgcagctcaaatcactcgatgaaggccacacattctttctgttcgtaaaaggtcttgtacatgaaattgtatacattgttgttttaactttaccccaataggcctgtaaatgcttgtgcagtaacttatattacttctcttcccttcaacattgtaagataaacgacagttgccaaaataaaatctaaaccttgattccagtattcaattgaaatacgggcatgtctgtgtattgttcttgagcaatcaaattctctagcacatttcttgaagtctgcctgcttttgaaatttttccagttaatagtcccattagtactgctgctaacgaccttgttatgacaaggttcggtcagtttaaacaggaagcaactctagttagaaaaccgtacactgaactaattccaaaaggaggtcaccaaatgcttacaggcaccaatgcatcgacctcctgtgctgttacctgcacttttgactggaacaagatttgaaaaatgaatgttgaaaataatgtgaagatcttcatatgccaatttgccggtcaagcaaaagtgcaaaacattgcaagacaaatccgttggtatccctaaaggaaaacattgcaaggcgaggagttaggtttgacaccctctgtcctatactcctatgtgccacagatttgatgaagatatggacaacttatttctcaaatgcaatgcggctatgttggctgc

SEQ ID NO: 4985 - DNA, 6214 bp, Sorghum bicolor
  misc_feature (2401)..(2561): n is a, c, g, or t
  misc_feature (6191)..(6214): n is a, c, g, or t
catgctcaaaaaggcaattctgaattgaaaaaaagagagacaattttaggtctagaccaaattaaattatttaaaattttattaagatgattagaagtggttctatacttttctttaaaaaatattgctaaacacctaataaagtttttaataaaccgcaaaaaatgtctctaaggcttataaatttttttgagaaagatttagtggatagattgggacacgatcaactcaaataaaatatttataccttataaaaatattatttgtaaactattatttaaactagtattatttagctctcgaaaaatgaaaaaatatccaaaaaaaaaatattaaaaattaaaaaattgatgtctaatttaattctgaaaacttttgtcaacaaaaaataatagatgcaaccatcaagaatgcattcagcataaacgcatattgcgtttcttttttcttgttgtgtttaggcattaatttagaatttcttttagatattttcattttcctatagttaaatctattttttgaaagcttctagatatattttcaaaactttaaacattttatttggatcatcgtggtctaacttgtccctgtactttttttctttaaattttaggatcgtaaagatactttttatggtttaaaaagccttaccagttgtttaccaatttttttaattaacaaaatatgaaattgtcttgaaaaccacttctaacagagacaaagagataattgaaacggctttcatcgttgatcattgaggcagataagcttgtttaattgtgagatttgagaaagagaccaggacccaaataatagttcaacgccaaatgaccttttacgcacaagtaaaatccttgtcaagagtcttttttttcaaactcacattctaaatcattatctagagagtcatttgaataaaaatcactctctataaatttccaccctccgcctttctaaaaaaagagagtttctatatatcttatgtgtatccttgggaacatgactatatttgaacctctaattacattggaggatattttctacctcaatttctattcttgccgattaaggaaagttttaaatattcttcgagttgctcttagaaaacaacaatacttgggctaagcaaacagttactctattcgggttgaccactggtgtgtatttccggggctcctgtgggttccaaactctccgcagccccgtgcgcacatatgaccactgaacacaatcactctacttccactttgaatactcagcaggcaagtgcccggcccgtggccattgctgcttcctggactcttggttctttgctgatcgcttacttgttctcagttcattagtacttctatttcatcagctcatttgctctgtttgtttaattggttgatcgaatctgtatttcggttggctaatctagaaagcacggcgaaaatatgaaacaaaacgacaagaacgctatcagaacgagatagttgtacatgtattgcaatttgacacacaattatttgggcgcatttggtgaatcagtggcggtgcacgaacgagaggcttacgacagaacgtccagcccctaacacggtataggctccacagtgatactcgtcaatcagtgattaagttaagccattatcgatgctcctactgtcctactacaatgcaaaccttgaagaggcctcgagaagcatccaccaattccatgatgcatcatgggaccattggggacggttgggggaagttccgttccgttccgtttcgcgccgggcgccgtcgccacgactcgacccgaagcagcacgaaaggaaaggaaaggaaacacgagtcgcgagctgacaagaagaagcgagacgagccagtaggaaagcgccaagcaagcagcaccagaggcagcaacgcagcgcatccactcgaccactcatcatcgtccaaacacccgcggccgcgggcggctgggctcgctccactccccttgccccgcaagcacaagcaacagcagcccaatggccgccgccgccgcagccgcgtcctcctctgcggcagcttgcttcctctccccgctcccgccgccacgtcgcccgcgtcatttcctcaggcacctcgcgcgcgccgcggccaccaagccggcgcccgcgcccgcgcccgcctccgcctcctcgccgtggccgtgggcgcggcggctcggctcgctggtccccggagagaccgcgggccggctgctgtcgtcggccgcgggctccctcatcgtcgcgctcgcctccgcgtcgctcgtcctcggcgacgccggcgcggcatccgcgttcgtggtctccacgccccggaagctgcaggcggacgagctcgccaccgtgcgcctcttccaagagaacacgccctccgtcgtctacatgagcttcccttcatnnnnnnnnnnnnnnnnnnnnnnnnnnnnnnnnnnnnnnnnnnnnnnnnnnnnnnnnnnnnnnnnnnnnnnnnnnnnnnnnnnnnnnnnnnnnnnnnnnnnnnnnnnnnnnnnnnnnnnnnnnnnnnnnnnnnnnnnnnnnnnnnnnnnnnnnnnnnnnnnntgtctgaactcggagcccctcagctcctccggatgcaaaccagaggctcgaggatgctctaatctcttccgcgtacttcgtgtgcgggcaggacgcgttcaccctcgacgtgctagaggtgccacaggggtccgggtcgggctttgtctgggataagagtggccacatcgtcaccaatttccatgtcattcgtggcgcgtcagacctcaggttggttcggaggctggatgctttcctactacgcttcctttgctcagatcaaacatcaaagcttgtcaattctagtattaaaggttagggtcgctggtgtttcattaaaatatgctctagtcttccaataatttcaagtggacagagtggggggaaaggagttgtggtgttggtaagctgtggcagcgcaattactgattgacaatacccagcaaactacaaacaggacccattagtaatggttcattatcaatttggctccctagaagacctggtcggagtacttgtccaaaaggccgatattttagtgtagcagaagcaacatgacacttgttcaacagcttcactatctggttgttagaagttatgcaatgccatctgcattacaattttagaaaaggtactgcttactctagaagttccttgcatcccaatttcaagaagtgaaacttaacactacattttgagtattttaatgcaaaagaactaattcttcaggctatcaatgacataaacttctgactttttctaaccacgtttttgtgttagttggcaatgctctgcagttgtgtcatctcactgctaatgtcaaatgatctccacatggtctgatacacgaatgcaaaacatccatatttgtttatatatttttttccggtgtcttttagatgtcgatgatgcctatagatatgtaatggtgaagtgaggttacaactgatagttttatgcagggtcacacttgctgatcagtcagtgtatgaagcgcaagttgttggatttgaccaggacaaggatgttgctgttttgcgtatcaaagcaccaaaggataaactaagacctatacctgttggtgtgtcagcagacctactggttggtcagaaagtatatgccattggaaacccagtgagtgctaataacacctttcttcttgttgtgttgcttataatacaatgagattatgtgtacaacatggttggttttctaccttagaagttagagatagatgtggtatcttagcttttggttggtgctctaactttttatgtacttgctactagtattcctgatttttttttcttattttaaccttgaattcttgatccatgataacatttgcatagactactgctgttcttgtttcatgaatatgttgttaggtagtgtttaaaggtaataagtaataacataccagagttgcagcaaacaagaatatgatcatatagaaaaatgatgtgtattgtttatgtgtccgcgctccacagaccagagtttgacacaattcctgtgtggaacgatatgatcttagctcggctaggaaaattattgaacttcaataacaagggcgagttctttcgataatgattgcagagttattaccaatttacctatagtctaaaacatttattactttttgtgtttgcagtttggccttgaccacactcttacaacaggtgttatcaggtggaacattgtttgttaagctgattcatatttgtctgattcatatcggaatgcactgagactctgtttttctgtttatgctgatgcccctagtggattgcgtcgagaaatcagttcagctgccacgggacgtcctatacaagatgtgatacagactgatgctgctatcaaccctggtaacagtggtggtccactccttgatagttctggaaacttgataggtgtaaacacagctatatactcaccctcaggagcatcatctggcgttgggttttccattccagttgatacagtatgtacattttcaactctgttttctaaaaatctgtcgacagtagtagttcactcaagtcagtgcctaaattcactttagttttgtttcattcttccttgcagttaactcacatgttttgacaacgacacaaataataccctattttcaggttgggggcattgtggaccaacttataaaatttggcaaggtgaccagacctattttgggaataaagtttgcccctgatcaatctgtagagcagcttggattaagtggagtgcttgtcttggatgctcctccaaacggaccagctggcaaagcggtgagattccttttgtatttcctgatttggtaatgacttaacttgaaagcagggatttctcggggcatgctataattatgcttcagtttcacttttgagttctgtactatattatttttcagattatacattctctatgcctagttacaacacatccaaccatgggaaaaccttgagctattatttattaatacactagattgtagcttctgttaatttttcatgcgtgtttggaactaagggcagctcagaaaacaaactggacatgaaaagctattttttcaaagaaattttccttcttctgtacttttgtctaacgtaatgcatttataaatcacgtctttgcatcatacagctactgtggctaaaagttctacttctcatgtcgttttgatcagggtctgcaatcaaccaaacgagatccctatggccggcttatcctgggtgatataattacctctgtgaatggtacaaaggtaacaaacggaagcgacttgtatcggatattggatcagtgtaaagttggggaaacggtaagattttgctttcttacctatacatgtttattcctacaaaagaagaaatttgacgtgcttgaccgttgctaagacactgagttacatggtgtttaaggtgaccgtggaagtcttgcgtggcgatcataaagagaagatccctgtggtcctggaaccgaaggctgacgaatcctagtaaacccaggttcttctgtaccatagcctcagtttctcacttaggtgcagaggcgcaaatacacaaggcgtcttagcattttcgcctgccacgggattcgttcgttgtacataattcatgcctgtagatctcactctctctttgtctggtggaaaatgggtgtccaggttgccgtaatgccgtcgtccgcatttcctgtgtgcgctatagcatgtacgcatcctatagtgctttagagtttatagatggcctaccttattaatacgagatgttcatcagatgaccatccagggaagggaactgcaggtcgatgaatgaatgaacttgctgatatcacagatcacctaaacctttttgaccaaaaaaaaaatacgtgctggcttttatgctggagcagttggcatcgttgcaattgcaatcctaggtgcgatcccggaacacaacagggatcaatgtgatagctatgccgtgacccgtgacgtgccatagatcgctggggttactatcctacctacattatctagagcttgtcgtggaaatcgggaaaaaaacagttgcagaaaaggagaggactgaaggagatgtcccgttacgcgcgacaatatatctatctggagaaaaaaaaaaaggggggggggggggggggggggcnnnnnnnnnnnnnnnnnnnnnnnn

SEQ ID NO: 4986 - DNA, 2683 bp, Sorghum bicolor
tcttgctcgtgttgcttgtatgttttttttttccacaaatataggcaatgcaaactcatctcccgtgcaaactgtgcaaactttaatctagaccgcagaatgttgatccaagggggcgcatgagagaggtggaaggaaggatttgtaaaagtatgattaagagcgggcggttaagtgcaaaattactcaatctttccgcgccccttggatcaacatcctatggtctagattagagtttgcactgcatttttttagtgtaaactgcatttttatcgtttcccatcccgcatccccacggatctgcggcacaatggattgtcgcatgaaatagcagctcctcaacgacgacggggagcgaaatttcaggcaaatttgtagccaactgccaaatttcctagtcctagtcccaccacatgcacacgccaacaacacgacactgatacacatacacccaacaagaagcaacgccaacgacagcaatcgcgcgccaatctacggcggcggcggcatgccaattcacattgccactagcagcgcggacgccaggcacatgcaggcggcggcgagccccgctcccgcgtgggccaggagccgggcggaggcgccggagctgtccccgttgtcgtcgttgtcctcgtcgtcgtcgtcgtccgtgtccggcggcggcggcgggacgaggaggacgttgatggcgagcttctgcccgacctcgcagtgctcgccgacgccgcagaagtagaagcgctggccgggctccgtgagctcgatgatggtcggcccgttctggtaccggttggtgatgttgtgcatgctgcacacgtcgaacagctcccgcgtcggcacctccacgatgttgtgcgccccgctccggtacaggaacactgccagaaacgcaagcgaagcgccggttttatatatcatccatgcaacgcatgcgtgcatgcgtcttgcttgcgtcgtggaaatcgatgaaaagggcgcgtgcgaggccgcctgcttactcagcttgtcgccgacgctgatctgcctggcgctcgcccagtccgcgtagtacgtcctgttggggggcatccgccaccctttgccggcgccgacgatgtggtatatcccggcggtcgagccggagacgagggacgccatgactgccgagaagagcaacaaggcgtgccggctcctcctacgttccatgctcgaccaccgaccctgctgctcgtcgctgctgcttcttcttcttcctctgctagctagcccctgttcctcgcgccctccctccctccctccctccctgggaggcttccctttcctcccctcccggaaacaaggattgcaatggcggaaagggagacgtaggtggaggggggacggcgcgcggcgagcaaaattggaggcaaatcgaggagttttggttgagtccatggacgcgtctgcctatttttgagacgggtttgctgtcgtctctccgctccaaagttggcaaatcattgggggtcatagacgggaaaccgatggagtagtatacacacctgcgatttttccatgtttggccggtcgcgtgaacaaattcagtctccagtctctgcttgattcatttgtttgcaattgtttttgttatctattctccaattctgatgatatgatctgtttttgctatcagctctagtgtccctgtcggttcatggtctgattacgtacaagttgataactgtaatgcttctatgtgactcatgttaacaagattaatcaagaaaagataagttgctgatcagatacacgctcagctcgtatatctccgtactaaccaggccaagcaaacaaacatcaacagcgaaagtggaaaaatacttggccagacgcgcagaataaccatttacatgtatgaatctgccattaactaatatattttgagaagacattcattatacttaactcatgatctagtcttttgagcattctactatagttacaacttacaaagccttccattaggcagccctagatatatgtacaataataaaggggaatataaaattattagacacattctcacgattaacttcttcgagctacaggatcattttttttctctctttccattgtttcctctcaacagtcatagcaagtccagcgcacatcaaaactgggttaaattcccattgagtaaggcaccacggcagcctctctagccgaaaagaagtttgcatggtatatttcatcagccccagggcccctaattctgtacagacctggggccctccttaaaaaggttgaataggtactgtgtcaaaatgccacagagatttacaaacacaacaaatagaggtgaggccttcatactcctgaaaatttctttggtttgcttgggagtttcaagcaaagcttccaataaccaatgattggtgttgtagtttgcttgcatagtgcagtcgcatcttttagtgccccggcaaaacagtgaaacgcagacctagcaaaggtaaccagtgcttagtgcttcctttgaggatgcagacactggataaggagggccatcagagcatcaccaagggcacgaaagcatcacaagcccgcatggcaaccctagaaccttcttctccaatatgactctcattggatcattcacacaagctcaagcactttgatgctaccactggagttggcagccactaccatgtttgacttccct

SEQ ID NO: 4987 - DNA, 11061 bp, Sorghum bicolor
accggggcctgcccgagatcgcgcggtgggaagctgggacgtgggaatagtttaggggctgggggtcgtggcgggcagcgccccacgtcgcggccgcgcggcgcgatcaggcgcctcatcgcgtacgcacgcacgtaccacgacgggcatgccgcacgcggcttcggttagctcgccatccatccccatccgtccgtcgtccgcgcggcctgggattgcctacttgcctggtatatcagtggctgtcactcaactgcgtctgggattattgatgatggagccatttggaacacgtgagagatgttcgccgacaccaggatgtacgatggttggttggttcctcatcttcttcacgttattatatatacacgtaagaggaaaaattttggtattaattagtatggttcagcagaaaaaaatactctagctacaaacaacccaaccctgcctgtcatcgtgcttagcctgcatgtaccacaggcatgccatttcgggaagttgcagcgacctttgctttcgttcgtgtcgtgtgcttgtgaactgtggagccggaaccgtacaggggagcaagttggttggggcactaaaaccagacaacccaccatcaattattttaatctcctcgcctcaatatcttcgcttattatttttctttccataggcaggttagaaaaccttttttgcatggctaggatgactcacgctcatgaacaactctgacgtactcaaactcaatggattgttgataactacatgggagacaaggctagtagtaatccttgccaaaatggaatttttaaaccctatctccgcaaaggtggaaaagacatgtgtcgaagctaaatctgcaagttccaagatcatataattcttaaccctatttccatcaaccgaaatacagttgtttgaattagagtttggacatagtaccatgtgatatccagtatatttgcacttagcatcttcaatacctttgtgcattcactttcacgagttgctttgcacttatccttgtgcggttgtgcccctacacatatcgctttcgacatgtcccccgatcttctagtgtccgacacgctctagctcccggcacgtcaccccgaccatccactgcccccatgcagtgtcgggcgcgtctgtgccctcgatgctctgccgtcgacatgccactgtcgtaaccatcgccactgcttgcgaggcaacacaagtggcggctagtatggtcttttcctttttctctcgaccgatactcttttctaggattccaaagccacttaatagacatcaaaacaataaaaattaagttgtagccaacttcaatacttgggtattgaacccaattcaatccacgttctgaatatttacacttaaaatagacccttagtgtcttgtctctccagctattgaacttccttcgcccctaaactatccacacgtaaatagacccttaattgcaatggcttataatagaggtgctagaaaaatgattttaatgcctcttagaatcacaggctgcacatgccctaaaactactaccagcaactgtagaaaggactagttctagtttttttttttaaacaaaggacaagtactagttggatagctctgaaatagctttccacgagtggctgggccgccaccacagaacccgcaccgagctacaggattcctggccgaaacaagcggccagggttgcaagaggccgcgacgacgcgcgaggagcccacccataccgtgccagatgcccccgccccgcccgaaagcgtgagccgtccgggcggaaaagaggcagcaaaagcagagagctcgagccggaagaaaattcgtttccccaccccacccatcagcgactgccgtggccgactcctcgagtcgagtagagtagtagtagcaccagttcttcctcctcggccttccaccgcttccgtccactcatccagcacgccacgcccacgctcgctcgccccctcgcagctcgcaacttcgcaaggggaggagggaaaaaaaaagcaggcggagcagagagagagggtcggacggcgagagagaaaaaagagggaaacctaggcggctttccgtttcgggaaattcccgggcgccccgtccgcgctgctcccggcgccggtggccgcgcctccgcgcccgcgcagggcccctccgcggctcgccccccggtaacgtgtggccctctttcgccggcggcgaatgccgctgtttggatcgggcgaatcctcctaacccgtggcctggaaccgctcgcgggagggggtggtccggggccttgtgggatgcgccgcgcgggcggctcgctgctggtctactgcgcgcgctcgccgcgaggtatggctccccgccgctgaatcggtcctggggcggtttttggctttgcgcgactaggccccttactgcgaccgggccgcgcggttttcgcagggtaggtttggtgcgatggaagggacgacggcggcggaggtgggcggcgccggcggcggcgcggccggggatgtgcagattaagggcaccaaggagaatgggcagcccgcggcggtggcggcagggccgccgccacagccgtctggcagcgaggcgctggagatgccggccacgccggtcacgcgggacttggactggtccgagcatttctccttcttcacctcgctgggcgggtttggggccagctcggacggcgcgaggggcctcaccagcgtcgggctgtccaattctgagtccaggccggacagcgtgacgcagcgtggcttggaccatgatgcggaagagagggtggaggagctcacattgaagaattgcatcaacaatgatgtccagcctgaggtttctgctggtgggagcacaagcagcggggataagcctactgttattaaaggcctgtggggtaacttcacacggatggcccggagaactagcgatttgcccagcagggaaaacgccgccgcactgagttacggcgacattgcaaacttgagggctgctgatggttctagcagggaaaatctggcgacaagccttgccaacaataatatcatctcaaggaacaatgatgcgtccggaaatgaggcacctatgagtcgtgttggatatgtcaataatgagttcatgacaccgtttcgcagccagcagattctcttgtctccatggtctaatcaggacaatgctcttaaagtaagcagcttctcgaataggattcttgaccggatgagaagtaagactgtggcaccccaatctgtggttctaggatcaccacttaaaagcaaatcaaaaggtaaaggggttgcgtaccaaggcgtacgggaggagatccaagggcaagctaatgcaagacccagagaccctttggacaagattccgactattcctacctcaattcatgattctatggccagagtggaccctatgcttttcactactggtggaaatgtttcaaaatcccactccgagggaacttgcctgagggaactgattaagcctgggcggcaaacaatgaccaagtttgataaaatgcatttgtttaagcaaattcttgatcttgtggataagtgtcatgcacagggttttactttacagcatttgcgaccgtcatattttacgaccctttcttcaaatcaagttaaatatattggttcttataccacacaagacttgccaacatcaatcaaacaagaggttgctagagaagatcttgtgaatagaaaaagggcttttggccatagaattgatcaccaagattctaatggctatggaaatttgatgctgaagtatcagaaggttggcgggcaaggctcagttgctatcaggcgaccagcaaatacattttggactgaccaaatatgtgacaatcaaaatgaagatgtcgatccaggtgtttcgaggcaagaaaattttagttacactgccagagagcgttttaagttcgtcgaaccatatggaaataatacatctggtgctcaacatgtatctagttctggcacccaacaaccagcatttgaattgaggaatcttgaggaaagctggtacaaaagcccggaggagcttagtcaatttaaaggcacattcccttcaaatatctacagccttggggttcttctatttgaggtatttctaatactttggtgtcatttttctgcagcagtatccatattgggttttgtagaagtgatgtgacagtgtgcaactgcaatttgtaattttgcaggttgtatgttactaatcatttactagcaaattcaagtggcttacctaaaatctggtatgagctgttggacttccaacatgcataccattgtgtttcctgccacatgtcaggaaaacaaaaaggacacagataatcacatcaattgtgagatagttgtttccctttcacatggtgatctccatagccaatgaaaaaataagataggcattctgctttttattggtgcatcagctcttggaatgctgaaaacaccttgctatgcagcatatttgaatcacgcatgtaccttataatgaatctggttgtggtttccatttttccaattgctattgaggccttaccttagttacatatgaatgccgactaatacccttttcttactacatgcagttttatgtagtctcctgttattataggataattccgcttgtaccactatcaccatgcgtgcacaaatttagttgcttactaactgaaaccacacttcagatggacttctctactttccgtgtgattctgtagattatatatcctcttgattctgactgaagtgtaagattctatcttaagtctgccaggcaaggtatttaattaatctaatatttttgtcagctcttttgctgttctgagacatgggaggtgcactgtgctgcaatgtcaaatcttcgccaacgcatcctgcctcgaaattttctttcagaaagtcccaaggaggccggcttctgcctttggttactacatccagatccttgttcaagaccaaaagcaaagtgagtttattcatctctctcatttggagccaaaataagaaaaatgcttactgattattgattagtaaattagtttgatataactaaaggccaatcttcttctatctgatgaattttgtacggtacagttgagtttagataactgtttgccctatggaagaagtgctagagctttgaaatattttatagcataaataagctctatcacagtcagcttcttatatttgttactttcgttgcttctgttcaacacagctgtacttccagttcaggtttttatctgattatttaggtttgtctataatctataccatgaatttaaatgtttaactaacttatgccatgaaataacaacctaagtttatttagaagtgttcgacttagaaaaatgtttccaagtataaggattacttctgtcattcatcgcatgtggaaatatagtattatccctttcgtgcccttttatgttcctttcccatctgaagactggaaataataattatatagctgttcgtgcctaatagccagcttactgatttttcagagagattcttggatgtgacttgataaatgagggtcgggatttgtccttgttagatcaggcaccagtttccatcagtgaagatgacactgaatctagtttgctgtttaacttcctttctcaactgaaagaagaaaaggagatgctggctgccaaattatcagcagagcttggaagcttagaaacagatatcacagaggttgagagaagacactcagcaagaatgagattgagtttagaggacacggatgtactgccaagttctggtgttttgtcaggagcttctgtgagtgccgttcaaggtgcattgctgtcaggtttgctaccgacatcgtgcaagtcaagtgtatatgaggagagggtaatgagaaatttggtgcagcttgaaaatgcatattactccatgaggtcctctgtggacaccagtgaaactaatgcaatcaaacgtccagataacgaggctttgagggttcgtgaaaatttccatcaacttcacagtgattttgatgctaagggtgagaaaacagaccgtcttggatgcttttttgatggtttatgcaaatatgcccggcacagtaggtttgaggtccgaggaattctgaagaatgcagatatacttaactctccgaatgtcatctgttcattgagttttgatagggatgaagaatattttgctgctgctggagtttcaaagaaaataaaaatatttgaatttgatgcactcttaaatgatcgtgttgatattcattacccactggtagagatgcctagcaagtccaagcttagctgtgtcagttggaacaactatataaagaactacctggcatcaacagactatgatggcactgttcaggtgtgtatctaaccgtatgctgctatacaagatacccatttatcttatcatcaatgaaaagtaggcatatttttcagcccttgcatgtagttttcctatatttcttttgatgacaccatttatccagttcagatggatttgatcttatataatttgatgatgctgcttttagtaatgcaccaaaaaatgctgactgtaaatttgagatattgtcaacctaattagattggtttttttttccactatgatttgttccataagctgtctacagatttacacttcacatcctcatagttttagctttggtgaaggcattctgtctcctgtgccaatttcttctgtttgcgtgccttctttgtgattagtattattatctgagagggagcacaagtaatcaaatatgttgattgttaaaacaagtactgtgaaggtgaatttggtgagctttaggcttactggtcattgtttgagaatttcattttcttttgttgagtttgatgcacatgttccactgaaaagcttaagggtttgtttggctgcacttcaccccaatccaccccaatacatgtggattggcgtttattaaagtacagccaaacaaggcctaaggtgttgaggataacaagggtagttatttatgtaggcaggccaataacatcatttcatatctagactgcttggatcttctagttgcttcatgtgaaaagcaacagtccttatcatttagcctttttagccctcagcaatgctcaatcgctacatgtttaatttttgagcagctaccttttccccttgtttataattttattgtggtttggatacttgtttactgttcccttgatactttacagtttacaccaaagagcaaaagcctctctgctataagcgtcatgctcttggagatggactttgtgttattcccgtgtttcctttttttaaaccatttggcttcctttttattgtgaaatgcagctatgggatgccagctctggtcaaggattcacacagtttacagagcaccggaaaagggcttggtctgtgagtttttcagaagttgatcctactatgttggcaagtggtagtgatgattgttgcgtcaaagtatggagtattaatcaggcatgttactgaaatacatccactcttttctttatcagcttatcaggcagttttcttacttttgggtccttattttgagtgtgttatgtcattcatatcttgtgtattctgacttaaaccattttagataattgatacttaaggtaagacagacatatcaaagtctttgttcaaaaagaaagacataccaaagtcatctagctgtcaatttttaggctgtcccttgaatgattactcaaacatattttgaaggctgaaagctaaatacgagtagtatgtaccacagtacacagaaatctgcagcgcatgtgtagacggttgactgttgaccccctacttctaccctccataacttcagtttcatactatgttttaaattttaatagcatttattttttttctcagagaaattgtattgatacaatcagaaatgtggcgaatgtatgctgtgtacaattctctccatactcctcccgcatgctagcttttggttcagctgattacaagatatactgttatgatctgaggaacacaaggataccttggtgtactatttcgggacatggaaaagctgtcagttatgtaaggttcttggatccagaaacacttatctctgcatcaaccgacaacacattgaagatatgggatcttaaccggactaattgcagcggattatctaccgattcttgcagcctgactctgaatggtcataccaacgagaaggtatgagaaggttttatgtactgcatgcttgttttcttacatttacttgtttttggaattaatctgaaccttactaataatgcttgtgcagaattttgtagggctatctgttcatgatggatacataacttgtggctctgaaaccaatgaagtgagtattttgtttcatgcatacatttttcttgtcatgcagcacttgtttagttaagacacagtcaggaattgagttctcttttcttttctttctttctttctttcgttcttttttttttgaaaatagttttgacatctgcttttaagaaagcaatgtaacagtacaagaactactggggttaccagttacaaagaaagaactcgataacaaaagccctagtacaagcactaaatttcgccaacatctgagagactgagagtatcatggtactgggcttgaaaccccttgagcccactcataatggagtccttcacctgggaaattcactcctgatccttctccttaaggttgacgctccacctctgtatcaatgataacgcaatgtagatcacatcagttggggccttaggtaaatgcttttcaattgccatcttatttctggaagtccacatagcccaagcaaatctgcaaaaaggaattgagttttcttcttcagttataagcttctgactgaacatctatgtgttgagcacattggtatgctcagaaaattgtgtttgtttccctctcccatagcacaaggctaaccatggaggcatggacccagtctctcagtgtacccaggttctcagcattacttttttcctctgcccccctttggaaaaaaacacctttatctgtttactacaatttgtgaaccacctcggccatccttacattaattattctcaatttctcatgttgatgctgtgtttatctgtagtacttaaaacaatggacttggtgttgatgtgcctgccattccatcattttacaccctatatttccctttatttatccacccagccactaaacacaaatcagttgcacctcctaccccaatcttctctaacagcttcatcatgcaaccaactcatgcatttctttgattttagtgctgttgcaacgcacagccaaggtgacagattgcaagttggattgacaatttgttgagagttactaatatggaacattgcactgggaaatctttagcttctgaaattcagttcacatttttatttatgacaaattttgtatttggaaccaagaaacacctgtattttgattttgccaatgaaaagttgcatctattgttttcgctacttgttctttggcaaatctgaaatcctcccatttattcattggaatatcaatgaagcatattgatttttattaacaaaagaaacatatagatgaatctattatgtagaaggattgctcatatgtcttttggtgtgtgcaggtgttttcttactacaaaactttccccatgccaataacttctcataggtttggttctattgacccgataactggacaagtaacaaatgaagacaaccaacaatttgtgtccagtgtttgctggagagggaagtcaaacatggtagtggctgccaactccagtggtagcatcaaagtgcttgagcttgtgtgaatgatccaatgagagtcatattggagaagaaggttctagggttgccatgcgggcttgtgatgctttcgtgcccttggtgatgctctgatggccctccttatccagtgtctgcatcctcaaaggaagcactaagcactggttacctttgctaggtctgcgtttcactgttttgccggggcactaaaagatgcgactgcactatgcaagcaaactacaacaccaatcattggttattggaagctttgcttgaaactcccaagcaaaccaaagaaattttcaggagtatgaaggcctcacctctatttgttgtgtttgtaaatctctgtggcattttgacacagtacctattcaacctttttaaggagggccccaggtctgtacagaattaggggccctggggctgatgaaatataccatgcaaacttcttttcggctagagaggctgccgtggtgccttactcaatgggaatttaacccagttttgatgtgcgctggacttgctatgactgttgagaggaaacaatggaaagagagaaaaaaaatgatcctgtagctcgaagaagttaatcgtgagaatgtgtctaataattttatattcccctttattattgtacatatatctagggctgcctaatggaaggctttgtaagttgtaactatagtagaatgctcaaaagactagatcatgagttaagtataatgaatgtcttctcaaaatatattagttaatggcagattcatacatgtaaatggttattctgcgcgtctggccaagtatttttccactttcgctgttgatgtttgtttgcttggcctggttagtacggagatatacgagctgagcgtgtatctgatcagcaacttatcttttcttgattaatcttgttaacatgagtcacatagaagcattacagttatcaacttgtacgtaatcagaccatgaaccgacagggacactagagctgatagcaaaaacagatcatatcatcagaattggagaatagataacaaaaacaattgcaaacaaatgaatcaagcagagactggagactgaatttgttcacgcgaccggccaaacatggaaaaatcgcaggtgtgtatactactccatcggtttcccgtctatgacccccaatgatttgccaactttggagcggagagacgacagcaaacccgtctcaaaaataggcagacgcgtccatggactcaaccaaaac

SEQ ID NO: 4988 - DNA, 4363 bp, Sorghum bicolor
gcgggcgagagcgaggagcggggagcgagaggactcactcggaagcaccggacaccggagagaagagaaggtaggcacaggctgataggcatgcatcatgcatgcctagtcgcagtcgcatccccgtttgccatcccgaggcaacgtagtacacagcatggcgcggactgcagcggcatgcctactagtacctgtctataccaccaatggagtacagtacactagagacagcatcgctagccactacccagtactactgtagcggcacctcagcacggcatcgcagcaccccgatcatcaatgcagatgaagagagatcacaggcgacggtactactactactacaagagcagctttgcttacgccgctgatgaccatttctcccgtcatcatcatctttggcttcaggccattgcattctcccctgtccctctgtgatggccacaccacacaggcatctgccggtgattatttagcgcaccgttgccatttgtttggggtctttggagaggaatgcaatgcaatggatgggcaggtccgcaggtggcccaaaacaggccaatggccctccatcattctcgcatcattaccgctagatgctgcgagatgatgacgatgattacagtaccacccatggtgggggggttgcggcgcgtctgcttttgcaggacccttgtctgtctgggtaacgcagcgcggcactcgataaagaggagcggggaggagactgctgtgtctgtctgtctgtctgtctgtctgtctctgacggggacgagaaggaagccgcggcatgtcatgtcatccctcgacgacggctcgactctcgcttggcaccggagccggagcctcgccgcgtcgatccgaggagcatggcatggcatggagcctcgccgaacgcacaccacagttgtggcgctgtccgcaaagatcgatgtgggagagtactaagcggctttactttttggtattatagtatctttatatttggtaattattttctaaatatagagtaattaaaatcaaaagttagttacttttttatctatattcagtcctccatgtatgtgccgtaagatttaatttgatggagacttttgaaaagtttttgaattctagggtggactaaacaagacattagctctaaaagttttcaagatttatcattatatcgaatcttttgacgtatgcatagagaattaaatatagataaaaaataatcaattgcacagtttgactgtaatttatgaaacgaatcttttaagactaattggttcatagttagacaataattatcaaatacaaacgaaagtgctacagtagctaaccctaaatttttctttgaagcctactccctccgtcccaaaaagagtgtcgttttaggtttttttggcacaagtttaactcgatttgtagaaaatatatacaatatttatatctctaaataaatttgttaaaaaaactagccttaaatatctttccaatgatactaataatgtactataaatactaataatttttactatatatttagttaaagttatttctcgggaagcgaaaacgacacttatttcgggacgaaagaagtaagtctgaaaaccatgtaaaccccgaaaccggccctaacctgactctaaacaccgttgagcattggtggagcttagtgagggccatatttggccatggaccctctaacttcatgtcaatgagatgagatgacatagtttttttttttttaaaaaaactgagatgagatgacattgttcgaacttcaagaaccgagcggacggccgtttacgtttaggagggtgttggactgtcatgatggccctcgagtctgtgaccgtgcggcccacacagctcaaagtgctgctgctgctgctgatttggatatgcgatggccggctcggcccaggaaaatattctgcccattgaagcccagaaggcccggctgcaatataagccactcccagccgtctcctccccacgcgaaaaccctagcagctcggcactcctccaacccaggtggcggcgcgttccttccccctcccctccttgctactactagtctccctcgcaaatcgccactgatgatcattccgcttgcttgattgttgcaggtgttacatacgctgtcggccgggtcctcggagcgcgggagatggcgtaagttctcccaccgaaatcttagtttcttgtgctagtgttttagtcatgtttaccttgaggcttgagccgtttgccgtgtcgccttgcgtggccgtcgttacccgcctgattcttcgtagagcagagtaggcagaggggaacggtggccaaaggcgggagaggaggtatcgctggttgctgtgtggagccgttagtttcggatgctagcgcatgggtatttagcggactgtttggggttgaggtggatggtcggctgacagagttgcaagggttggctgatctaaagagttgcaatggcccagccatcttgtcatctttagcatttttgtggtttattatagaaaatatttattcatatagatgggcattgctgtacaacactggaaggcgatccaacaggatttaccccggttttgatctgggggttgctgctaaaacacaggaaggcaacccggatgagtctttattattattttataaatcatgaccatggtagattttgttgaggtcttaagtttgctgagtttgttcagtactgtattactgatttgctatgggtattttgtattgcgaattcaattgtttggtgattgctgcatgcctacaacacaggaagctcatcagttcacgatgattttgtgctttggcagggatcaggagaccccagctgtggttgaggcacctaccccggttcttggggagccgatggacctgatgactgccctgcagctcgtcatgaagaagtcaggtgctcatgatggccttgtgaagggtcttcgtgaggctgccaaagccatcgagaagcatgctgctcagctttgcgtgcttgctgaggactgtgatcagcctgattatgtcaagctggtgaaggctctctgtgctgagcacaatgtccacctggttacggtgcctagcgctaaaactcttggcgagtgggctggggtgagttaaagagtgcttccttagaaatatgtaccttgttttacttttgtatatcaatctcttagatggtccaagcaaatgatttggcttacagtgttctgcctaatgttgagagagaggagaatataatatggttttggtatgttaatatacatgtacattctgtttttgttgtgctgtgacttacatacaaatttgctcagcatggcaatctccattttgctttgtacttcctcagtattaattgcatttcattgttgtgtaaagtgagttttaatcttaacaaccttcatctatggtcctctgtagctttgcaaaattgactccgagggcaaggcaaggaaggttgtaggctgctcctgtgttgtggtcaaggtgactatcgatttcctactctaccactacaagcaactacttccaattatatttgcatcaactgatttttggctgcctgatttggatcatcaggactatggcgaagaatctgaaggccttaacatagtgcaggagtacgtcaaatcgcactagatacacactatatagtgtgccagtatctggaacttgtgttctactacattttgcacctgagtttaaatttgtgcttggttcttgggctttgctaggagattagaacaattttcaagtgagccaaggattcatgtgaacgatttggacatctcaactcttgtttgaagtgctctcatctactgttaatacaaatcagcaagagccagtattctgcttgtttgttgttccttgtccttgtcatgccatgtggattcgtgctgctgcccgttcttttgttggtggtttatgcaggggttgttggggtcgcaatatagcccctccgtttgagaactaggcggattttcttatttcgatagaagtgagttgtgacaccggcaatattttatcaattcatgattttctaaatttagaatctgatgtcattatatttgcattgaaaattttactatgtttttgtatataataatgacatattgataaagtattgtcttccaaagtcttccaatgagtctactaattttaagagttggttttacttggttttgttttggtgtctctgcaacggtaaatctattgttatattggttaagttttgttttgcattttagtgtgggtgtatctgcaacgtcacatttattattgctatcggttaagcagccagaacgattcgtttgattgaaatcgatataagtgacgtttatctttgattgatgcccctacgtataag

SEQ ID NO: 4989 - DNA, 4656 bp, Sorghum bicolor
ctagtgcatgtggacagggttttccagtaacttgccactccctacaagtgcatgccctctgagttaaataaacaacatgcctcctgacctcttcatccttatacagctcagtgacttcagtttgctcaggatggcctttagtgacctttagtgaccttcaggtggtgcagccctttggaagctgcattaagttggtgaattatagcaggtagtatgccaggtgataaggccctagagatccttcttctcttggcaaacagtacaactaacttctcccttatagcatctaccatgcagtgaggaggcaaatccttcaagtccttcacccaagaattccaactctcagcaaggttgttgttaatgtaatcacatttgatgtctgcactgaatttacttcttgcccataacaaactatgatgggcatccagccactttgttatttctgggcttgctaccacaaccttgtcaaaaaagtatttgaacctatgtggagagtaggctcttgctgcaggccacatatttttggcataaacctcaccagtgtagtacttcttcatgttctccatcaaatgtctaaagcactctctctgctctgcccatggaaacacttccttgactgcagcttcaaggcccttgcatgcatcagtgcaaatagccaacctagggaggggccctattgcttttcttagttgttccatgaaccatgtccaattttctgtggtctcagtgtccaacaaaccatatgctagtggaaacatccaattgtgccgatctaatgctaaagttgcaggcatttgtccattccactctccattcaaatgtgtggaatctatactaatgtaaggcctacaaccatgtacaaatccatctatgcaagccttgaaagcacaaaaaaatctagtgaaatgcactttcccatcaactccgattgtgtctatctctacaacactgccaggtgacctcaactctacctcggctttgaatctatacaaccaatcataagaatcagcccacttaccaaatagtttgtccgctgccctctgtctcccataccacacagtttggtatgggatgtcaattgtgtacttgtcatcaagaaactccttaactgcagcagcccccatacttggttttttcttcaatagaggtattgctctgtgtgcaacccatcctaaagaagccatctttgtgtcctctctattcattgatgggcacttgtggtcatcactgttgatttgaatctgcacaacagaccatacagtgttagaaacatatggtgttacaaacatatagtgttacaaacctatagtgtcaactacatagtgtgcataaacaaaaatgcaatgccaccatcattgttctcatttccagcctttgtagtaacctcaacatcaatgtatgccaccctttcattccatttctcctctatcattttctgccaatgctcatcccttctaattttccattcagagccaatagtatcactatccaaaacccacactgacaaagtctggctaggtccccaaataatttttgcagacatatccgcatgaaactgagctgtattgtacccaacactcctatccacccacagcacatgttcttcgtcagacctttcaacaagcccaccatccccaagcacagcagtatacttaccaaccgtaagaactagtctaaatgcattgccaggttcgatcctagcatgaatataaacataaaaaaattgcacagttagcccaaccatctgtactgacctacagtcgaagtagagagactcaccatggggggcagtcatcaggttccatggtcacagatcgggatcgagcacctactacatcacccgcctacgaacttgcctacatcaacacagaagcgtgttcaaccatccatttacagtaaaatcaaaattcaaccctaaccctagctctgcaatgtgaagaaaaaaaggggccggcgaggtggggaggggagaggggtgtactgcgcgacgaacctgggtcatggaggtgcacatcggggtcggagttccggccaccgtccaccgtccaccgggcctctctccttgtcgccggccacctggagccgagggcggacagggaggggcgcagggagccgagggccggacacgagggcggacgcggagggagggcgcgaaggagccgagggccggcgggcgcgtggtgaggcagagagagggccggaagtcgccgccgccgtcgggcgcgtgggcgcagagagagggcaggggcggacgcgtcgcggctctggggagaacgcgactcttcgaagccaaacgcgattcctggggcgtcctggatgcgaacgcgtcctcaaaacagaggaggggcaaaagggtattttcccatagccaatccaagctggcatgatgagttggactgccacatagctgaaattggcaaatttatatgactaaagagatacctagggcaaatttataattgcacttataagaagggcatctgagggtgcaaatatttaaattgcccgggtggtgagggccgtggcactgtgctctcgctcaagttggataggcgtgccgcgtgcggctggtggcacagagacgccatgggcgcagacttctgttaccgatctcacagctgtgggtgagggccgtggcactgtgctctcgctcaagttggataggctgtcaggttcaatttctgggctcgccgtagttgatcccaaagggtatttgacagacctgaaaagtatgaagattactagctagcgatgctaagatttctgacatcaagaaggcgcggctattgctcaagtaggtgacacagacaaatcccaagcacccacccggttggattactgctgctaggctcgaagagattgctggcaaacttcaggttgctcggcagctcatccagcattccagcgtggctgtgaggagtgtcccaagaacgaagatgtttggcttgaggcgtgccgtttagccagtccagatgaggcgaaggctgtaattgcccgtggtgtgatgtcaattccaaattctgtgaagctgtggttgcaggcagcaaaacttgagagtagtgatctgaataagagcagggtgttgaggaaagggttggagcacattcccgattcagtccggctatggaaggctgtagttgagcttgcaaatgaggaggatgcaaggctcttgcttcacagggctgtggagtgttgcccattgcatgttgagctttggcttgcccttgtgaggctggagacctatgaccaagcaaggaaaatacttgacaaggcgagggagaagctccccaaggagcctgccatttggattatggctgcaaagctagaggaggcaaatgggaacgcacaatcagttaacaaggtgattgagagaggtatcagatgtctacagagagaaggaatggatattgatagggaagcatggttaaaagaagcagaacccgcagagcgtgctggatcagttttgacttgccaggctattgtgaagaacaccataggcattggtgttgaagatgaggatcagaagcacacatgggttgctgatgctgaggaatgcaagaagcgtggttcaattgaaatagcacgtgccatctatgcacatgcacttactgtgttccttactagtatttggctgaaagcagctcaacttgagaagagccatggaactggggagtcacttgatgcactcctcaagaaagctgtcaactacaatccattagctgaagtattgaggcttatggctgcaaagaaaaaatggttggctggggacatgcctgctgcttgtgccattcttcaggaagcttatgctgctatccccaattcagaagagatctgtctggctgcattcaagctcgagtttgagaacaacgagccagagagagcgaaaatgcttttggccaaggccagtgaaagaggagggacagagagggtttggatgaaatctgccattgttgagcgggaattgggcaatgttggtgaggaaaagagattgttggaggaaggattgacgctgttccctttattcttcaaattctggttgatgcttggacagatggaggactgtcttggtaatggagctaaggccaaggaggttttgagaatggcctcaagcactgccctaattgcatccctctttggctctctcaaactagcctagaggagaagattagtggcttgagtaaatcacgtgctgtcctcataatggctagaaagaagaaccccgctacacctgaactctggcttgcggcaattcgagctgagttgaggaacgggaacaaaaaggaagctgacgctctactggccaaggcgttacaagagtgtccactgtccagcaagtggtattctgtgggctgcagctattgagatggcgccacgcccccagcgtaaaggaaagagtacggatgctattaagcaaagtgatcatgatccacatgtcattgcaaccatggccaaacttttctgcttgacaggaaggttgataaagctaggagttggttgaacagggctgttactcttgctcctgatgttggtgattctgggcattgtactacaaattcgaacttgagcatggaaatgcggacacacaaaaggatgttctgaaaagatgtgttgcttcagaaccaaagcatggtgaaaaatggcaagcaatatccaaga

SEQ ID NO: 4990 - DNA, 4385 bp, Sorghum bicolor
tagcagctgctgctgcatgtgcatgcagccatgcaagcaaggtggctggctttaatcgccttgcttattagcagagcaaccatctgagggtccgtgcatgcagatgcaaatgcagcagcacggcggatttggtttcagtaatggcgtttgattcatgaaaggaatggccgttagagcacgatggtttggcttcctgtttggaccacgtgtagtataccatatattgtacgtacgtggtaccgtctatatttatttgtaccatcactgcacgtctgcacttgcgcagaactgtaaactgtaaaagatgtgaatgctcagaaattaacgtatactccatccgacccacagtaactactacacattttgtttttttcaagaagtcaattgtttttttttaaaaaaaactaaccaaatatatacacaaaaatactaagaactgtgtttaatatgtatgattaaattaataatgaaatattttaaaagtaaatatattaaaaaatatcaatgttgataatatttttatataaatttagaaatcatgaaactaaaaataagattgattctttgaaaagctagaggtgaagttattttggtcctgacggactactcttatgccttgtttagtttttaaaattttttcaagattctccgtcacatcaaatctttgaatgcatacatgaaacatttaatatagataaaaaaaactaattgcacagtttacttataatttgcgagacaaatcttttgaacctagttagtctatgattaaacaataattaacaaatataaacgaaagtgttacgatagccaaaataaaaaattttccacaaactaaacgttaacttgagacagacaggactggaagtctggaactagaggagtggacgacgactgtgctctggatcctatacaagccatggggccaacgccagctcacacacacaggctgctctcttcgtctgccgacgctgccgtgccagtgaccagccactgccatcctcaaagcacaagggaccccaaccagaccccggatccatcggacagagattcagtaacttgccttgagcaagtcacgacgtaacttaccttcttcatccattcttccaaagtcttgtttagttcaaattttttttataaaattaaaaaaattcagatattttccgtcacatcaaattttacagcacgtgtatggaacattaaatatagataaaaaataattaattacacagtttgtctataatttgcgagatgaatcttttgagcctagttaatctatgatcggataatatttatcaaatacaaacgaaaatgctacactatctattttgtaaattttttttggaacttaacaaggcccaaatcagatccagtggctcaaaacagatccagcccttcaactcatgagacttggttgtattttcggacatagatagtagatagcagcataattcatagtttcaaaaaaaaaaagaaaaaaagtcaataatttaggtccataattcagatggacatatacatagcagtttaacaaagcacaataaaatacaagtccaatcgtagactaactagactcaaaagatttagtggctcgcaaaattatgtaattagttattttttatgtataattattttttatctatatttaattcttcatgcatgtgtcataagatttgatgtaacgtggaatttctgaaaaatttaaaattttacaaaaaatattaggaactaaataaagtgttggaggaatgaatgtaggaggtaagttacattgtgacttgcccaaggcaagttactgaatccctgtccccattccatggcgctgtgagcttgtcaattgcagctgctggcaaaacaacaaccgcatttacatccaccccgaagcagggacgcagcagcttttgcgccttgtactctcctgctcgtcgcctccatcctccctgcttcaccgccaccgcaacaagccaagccaagccactgcgcggctgcgccaagaaagagggatgccgccggcgctgcgcctgctcgtcgcgacggcgctgctgctgctgtcgtcgtcggcgggggcgcaggattcgtgttggtcggggccggcgccgctgcgcggggcgtggatgtccgtggccagcttcggcgcgcgcggggacgggcagacgctcaacacgggcgcgttcgcgcgcgccgtggcgcgcatcgagcgccgccgcggcgcgcggggtggcacgctgctgtacgtgccgcccggggtgtggctcacgggccccttcaacctcacctcccacatgacgctcttcctcgcccgcggcgccgtcatccgcgccacccaggtgtgcccgttgcccttcttcttcgtcttcttcgtcgtccgtcacttggtcgccgccatgccttgccatcgaactaagcctacatggagcaggacacgtcgagctggccgctcatcgacccgctgccgtcgtacgggagagggcgcgagctgcctggcgggaggtacatgagcttgatccacggcaatggtctccaagacgtcttcatcacaggttcttgctggtacggttacgcagtgtgctcaggtacctgagcgattcacactgatagcacagcgttcttgggcaggtgagaacggcaccattgacggccaaggcagcttgtggtgggacatgtggaagaagcgcacgctgcccttcacgaggccgcacctgctggagctcatgtactccaccgacgtcgtcgtctccaacgtcgtcttccaggactcgccgttctggaacatccacccggtttactgcaggtgagcactgcgaatggatcgcctggggaggggagccacatttttctcagtccaactgctagctagcttgtttttgcctgttcgttcctgttccacagcagggcttcagctagcgccttgacagtctacagtgtagtttcaggaacaaacattaactaagcaatacgattagcatgaaagctgatacacaacttacagacatctggttagctgaacaatgatgttgatctgatcccaatgtcagacagtttaaatggtcacaactcacaaaaatgtgtcgcttcatttgtgtgtatgcagcaatgtagtaatagcgaacgtgactgtgttggcaccacatgactccccaaacactgatggcatcgatctaggtaatggacgctttacaaagctttcttaaatctgagcaaaattttgcgtatggctgacaattaatgaagttacatctgcatcatcgtgcacctgcagattcaagcagcaatgtctgcattgaggactcctacatttccgcgggcgatgacctgatttccatcaagagtggctgggacgagtacggcattgcttttggccgtccaagctctggcatcaccatccgaaggataaccgggtccgggccatttgctggctttgcagttggaagcgagacatctggtggcgtggagaatgttcttgtcgagcacctgaatctcttcggcatgggtgttgggatccatatcaagaccaactcaggaaggggaggattcatccggaacatcaccgtctctgaagtgaccttgaatggagctcggtatggtttgaggatcgccggtgacgttgggggccaccctgatgcgtcctacaacccaagtgtgcttcctgttgtcaacagcgtgacgattaagaatgttttgggtcagaacatccggcaggctgggctgataaggggcatcagaaactcggttttcagtaacatatgcctctcaaatgtaaagctctatgggagtgcatccatcgggccatggaaatgccgagctgttagtggtgccgcacttgatgtgcagccatcaccatgtacagagctggctagtacatctgagacaggtttctgtacaagttagctctgatttctgccaagtgaatcttgctattctcagttttgctaaggcatagaaattctcctataccaataaacatgtcagcatttctcctttttgttcagcagaaatggttactgattaactggaactgtaacggaaccaatgatctgcagttatccgttgattcattaccttgttcattcacagggacagtcagcccttttgtttcttggcaaactcttctgcaattcagttgtcaggtctgattgaatggaattacttcttaaatctactctttgcagaggataatccaaccttttacatgacatgctattcattatttaccagcaattattgcaagagcattttccatccgtaaaataatgaaacctatcggcatctcgaagaataatttgtcgtgcacatagagcagagatgtgcttggccaactcatggcagtcattgcacatcctggtgttcttgatcaccctgatgggcactctgcttgcatctgaatggat

SEQ ID NO: 4991 - DNA, 5459 bp, Sorghum bicolor
ttgcttactctatattgtgcgtgcaaaataagaagtggatggtttaaaaactcttgtggagtatattgtcggccattagctctattttccactatcatcgatatataatgagccaccggtgctatttcgagtggaagaatattccacatatagtgtacgcaagcagtagtgcaggagtacatgcatatccatgcattccgtgttgttttcccatactgtttgtggcatcgaatataaagattgaccacgaacacgaagagtccattgcatattgcttccattttttttcttcgtgcctgtttgttcaatggacagttttgccgtctagtttgacctagcttaattacttttgttggttgtactaatgccttttttattttaattggtcaatgaaaaaagctaatcacgaattaaccttgctataaaaaggagcaacgaagtactgtatagttgtttccctatatttggaaagtcgcatatatttttttccacacgaaacattcgtcgaggtgccattttgtaatagtaaagcatgtgtcatgtgtgaatgtttttttctcccattctataataatggttgctctctaaaataaaatataatctgcccatctcgagcgtgagaagaaaacctagacagtgaacaggaaacctaggagagggacgtggtggatggatatgaacagaatagagccacggtggcacgcacgtccacatggttttatttgacctaggtcttatttagttctgaattttttgaatttcgctactgtacaaatttcgtttttatttgataaatattgtacaatcataaagtaactaggcttaaaagattcgtctcgtgaggcaaactgtgtaaatctatatttaatgtttcatgcatatgccgcaagattcgacgtgacagaaaatcttgaaaaaaatttggtttctggagtgggagtggactaaacaagttcctatttgtagatagcgtgtgagtgtgtgacccagcaagcaagtcacaaaccacttcgctctccattctactataaacatgaaatttcaagtttgatcgaagtaaaattaatttaaatttaactgaatttagaaaaaacaatatcgatatttaaaattacgaatacatgtattatgaaaatattctatgataaataaagctaataatatctataaagaatgataattattaatatttttctataaataggagcataattttagggtgtgtttggttgggctgtgacttttgaaaaagctactgtgagctttgagcttttgaaaagctgctgtgggatgtgagctttgagaaacccaaaagtcatttggttggtcactcgtggcttttggaaaaaaaaactgaacgaatctcaaaagtcagtaaaagcagagggtgaggtgcttttggatttgtactacgagaaaagctgtttttgggcaaaagtacttgtggcttttgggctctttggttggcttttagcttttacaaaagcaaaagcaggtttaaaagcccatcaaagagacccttaaaattatcctaccacaagtgtagtatagtaagccgagcgagagtacacacttaggtcttgtttagttcactccaaaactaactttttaaagatttttcgttatattgaatcttgcggtagtatacataaaatattaaatataaataataacaaaaacttattatataatttacttgtggcatgagagagagcgcacgcgcggaaatggatttcatggagagagaaagcggatttgcggggggcaaataaagtagtagtaggagtatttaaggttggaaatggaaaccggaggcagtataggatttggtgcccacaggaaggcgagggagagcggtctccggtgtggcctccctccttcctcccgtcgccgccccgcccgctcccgcccctggttttggctttcgtttcgtccccgctctccctttgccttccttcctcccctctactacttgtactgcacaacccccgccccccgatggctgcaaatatcaatccaccctcctctccgcctcccgatttaggatttatataccccaccccagccccgccgatcccctgcctcgcctcttccggcccgtcctgccgccgtccgtcgccaagatcccgccgtcctcgcctcctgacctgacctgacctgacctgacctcacccaccgcgccgtcaccgtgacatgccggtgcaggtcggagggagcaaggtggcggaccccaggccggccagggtgctggacctctcgcccgccgccgtcgtcggcgacaaggcccgcgcctccgccaagaagaaccaccgccgccgccacaagaaggcctcctcctcccccgccgacgccgccgcatcttccatctcgcccatgcagaggctcttcgacaccagcagggaggtctttgccaactcctacccgggcttcgtcccgccgccggacgccgtcgcgcgcctctcgggcatcctcagtacgtatcctgtactactgctgtacagtacatcccgccccgcctttacctttccttgcctttccttttcttcggtacagacagcaaagctgccgtctttgtgcgtgccgtgcgatttgatgttcttttcctttttgatatcgtataatcgtgcgatttgatgttgattgcctggaacacccgtacttgcctgcctcctaatcaccacgtcctcctgtacagcagcatgttgctcgtgcttaggatgtagagacagcgataacagcgtatattatcgatgggcatgggcgggcgcatcacagggatggatgatccatcctttcctttttactgttgttgtccgctctatctcgtctcgtctcgtctcgtgatgaggttgagatcgcgtccgtttttggcatgcatgcttgcttcaaagcgcaaaggccttgggcctcgataccgtacctggccagtttcgctgcttttgctatgcatgtcgcggcaagttccccatcccatggcattgcagaagagagtgatattttaaccaactactgctaccactccgcctgtcaaagtgtgatgatggtgggaggagcctaaaagcttgcatttttgaagtacacctgtttaattagaaatactgttcttgttgtcgtcgtggggggctagcagctagctccaaccacggaccactcccacctgtatcctgattcctgaagctgccattccacagtgatggttacttggtcaggtaggcatgggccaacatgagacaactcctacaatgctgctctttgcatgccttaacttgcaatcctcggtccttttttttaacatagcattgttcggactacaatgtttgtgtctgttctgttcaacataaaatatactgcggttttgcacttacatacactcttgattgattgcgcgtgacatggaagcataactgctaatgctatgtggctgactattgcattcactgcttttcttctaaacctaactaatagactctgttgtttgatacctcaataatcatggaatgcatttgtctgatcgttatgcttttggatgcagatgagctgaaaccacgtgatgttcgggttgccccaagtatgtccgtcttcaaacatgctgaccctaaaagcccccctccagttacttatttgcatttctatgattcctctgagttctcggtaatttaaactctccatctctgtgtatcgccttttgaggaacttgctatcagatgcctcttgctcaaccattgaactgttctttgcagtttggtatcttctgtttaccgaaatcagcagttattccccttcacaaccatcctgggatgacagtgtttagcaagatactatttggttcaatgcacctcaagtcatatgattgggctaaaagtctgccggatagtaacgataatgcacttcagaactctgatggttagtgctgatactaccttccccttttttgagctgtccaattacaaggaaatacttatgacttttctagtcaatcactgtagtgaaaatgaagatgttgataaaccttttatggtttgtttcttgtcccaaccacaggagctcgtctggccagggtaaacacagatgctgtttttgacgcttcatctgagacggtagttctgtaccctgaaaatggagggaatttgcactgttttacggcattgaccccttgtgccgtgctggatgtgatggggcccccctacaaccgtgatgagggaagggattgcgcgtattacggtgaatcaccgtactcaggttcatgtggtgagtttcttttgctaccaatctcctgcagatgtagaatctagaatgccattcaaatcaaaagagtgttgatactgctccttaacgtaatgtggtagtctggtagctgagggatatgttgtgtgatttcaggtggagatgaacaattttcttggctgaaagaggttcatagcacatttgagatgcaaggcataaagatggagcagcacttcatcatctaaggcatgatgactggcatggcattgtggcgacatcagaagacaaattggacgtactagcgggcagtttgatgtagatatctttagctgcaaggacaaacagcaggggttacaagtggaagactgcgctgggccgggatgttcagactaggaaacttgacatttgtttggcttatttcatatgggttgaaacagcttcttgtgatctgggattgactctgcttcccttattttactggagtatctgatagcacaattcgaatctgggtttttgggtcatggtcactttttatgtttccctgtagacagaaatgtaggcaggtgtactttttgaagtgatcatggaccgaatcctgtgggtcgtttggttggttttgttgagcagggcagtgagtcgtgaactttttgcctgctttcatgtttcaatttcagtttcaggggcatatcttttgtttccttgttgaacaaagaactatctctagtagcagtttgcattctcggtgtctagtctttgtgcactaaatggatgtggatatggtccaggcttccaaatcaggagctgtggtgtgaggtgattgggacgtttgtactccccgctagtacgtccgatcggatcatcggaaccggatgaaatgaaagatacgtatagcttcgtcgcatcgcagattactgtggctgctctgctgtctgtacccgacactgccctacccggtccaaaaaatccgtctcacatagcataacgaccttctcgcttttggggtctccgtcccaaaaataacggagttcttgctttttgtctagccgtctcaaaagaatgcagtctcatgtcctccgtctccgtcctagtaaaataagaacaatatagttttgtctctttgtcctaaactagtaaaaagaatgtggacttcaacttcagcatccttagagcaactccaacagatatgctattcatgttgtctagactatttttacatttttaaagcaaaagttaaa

SEQ ID NO: 4992 - DNA, 6196 bp, Sorghum bicolor
ggaaacataaactgcaagtaccaacctggtaagccagttccctagtgtggcacagtacaagtgctgctacctgacccgcaacagggtcaatttgttggagggatgaaaggacaaaaacagcagttttccccatcccagatttagcttgacagatgacatccattccaagaatggcttgagggatgcactcgtgttgcactgatgtggaaccaaaagaaattggagcagcaccccagtgagtaaaagtttaaccttctggatccgtgttaatggaaagtgttaccatgttctgctccaaagaagaaagtgtacctgcaaaccaacaagacaagaatgttacaaactgcacggtttaaacgaactataagcattgaagcccagcggagaactaggaaaagcgttacagcaatgtgctagaagtgcctggcacaaaatatttgccattaatttttatagtaagatatttagttaacaaagcagctttatgacaagttaaattacatggacatcaatgtacaaatacatcatgattggagagtcaactggataacaaatattgcattttcgtctgggaaccttttcaaaagtagttcctttacttaggctgcatttattcgttgcaaaaacttttttttggttatgtaacagcaataatcccactggaattggaaatatttgtctaacaagactccacactgcagagcaaaaccataacagcgaaaataccagaagcatacaaaaactagaagtatattactaataaaatacagcatgacttacggtatatgcctaagaaactaaagccacagtttaaagacatttatacagaatccaaactggctctccacatgtattgagcctcctaacatcaaggcatattttttatggaagaactatttactgctatatttatactgtgcagcttggttttaggaagtaaaccagtaaccatggtatgatatacaaagttgaccgtcttgtagaacttcagtcgttaatcttatcaaaactaaaaattcactgcctctgcagagagtttatcatcttaagaattagggatcgtgagttcgcagtcacttgaagaatccagtagcaggcacacagaagtcaacggtgaaaagaatagatggaaagagaagcttgccttcggaaggatgttcaaaaccgcaatcctgaatagcacgaagcagctctggcttgagcaggaagtctctgaaaccggaactgtggatcccgacgtagcccctgatttgttatttagcgcaattaacgtgttagcatagttgggaatcagatcgaatccaagtagcagagagagaggttagtgaaatcaaacagttgggggaagaaggcttacttcttcgcgacctctccagtgggcttggcggcggagccatcgaccgtcttgtcatcgtcctcctcgtagtccaggagctcctcttcgtagacgtcgttctccttggcttctcccatcctgcgcacaagaagcggaacggaaaccgtcagcaccgcaaaccctagaaacccagatctcgcgattcaaacgcacccagcactcgaaattcaaacaaccgctaaggggggggaaagaaaaggagaatctactactcacatgtatggatctgtcgaacggagcgcgtgaagtaggtgggggattggggcggcgactgcacagaaagaattaggattagaggttctgggttttgggatgggggaggaggcgacgggcggcggcggcggacaggatagggttgggtaccggctgcggcggggggctagggtttcctctccacgattcggggccaacttgaagacgacacggagcacctcgaccgagcacgaaccatttatttatactgggaagggaagtaatccccaagtatacatgggccgcggtcggttcctaatgggccgttacatgggctctataggcccattgaaatacagcccatgacccctccctctcctccttccctagtacagtccctacgaggggagtagtagtgtactccagtggagaagaagagtagtagagagagacaagcactctcttctccccttcttccccaaccccgactaccccactgctccgcctcgcctcacgccaccacggggggagcggagcccgcggcctgtgccctccgcgccgccgcagtccctccccctgcgcaagcggggagatcagattgccggataggaggaggaggaggaggaggaggaggaggggattggaattggagcgccagcgccaccacagatgggggctctgcccaaggagggggccccggcggtggatgtctccgtggaggggaccctggtctggctgcgccgccccaatggctcctggtggcccagcatcgtcatctcgccgcaagacgtccccgaaggctgccccccgccgccgcgctgccccgccacacccatcatgctcctcggccgccgccccgacggaccaacctatgtgtatgctgcttcttgcttccgtacttacttactggcaacaagatgtcacaccatgtcagtcactcaatctcctgctcaatccttcctcttgcgcttgccacagcgactggtgtaacctcgacaggtgcaagcgcgtcaagcccttccgctgcggggagctcgacttcgagcagcgcatcaccaacgccctcaccctcgccgccacaggcaacaggtccacctggagctacaacaagggcaggtacgcccgcatggaggacgccattctccaggccctcgacatagagaaggagcgagctctcggctcaaaaaccaaggcctacctccatgctgccagctgctctcccagtcccaaaactgaaatgaccaacgggcaagtcaaagatgctacagcaaaggatgcttctccaaccattcagccgtcaccgctgctgttgccgctccccctgccaccgctgccgcccaagcggaagcgcaagacgccctatgactctgaggacgatgcgcccaaagggtcccgccgcatgagggacctcagggacatcggatccaagacggtccccccaatggacttggtgaatgctgccgcaatctcggctaccaagtatgatgatctgcctaatgatggacaggtcaaaagaattgtgcactctcaggccaccacaaagaggaagcatgctgacacgcatcaggaccaaccttgtgggatccccaggaagaaggataggtctcgcccgctctcggagctctgcaatggagacatgtggaatggttccagaccaaatggccagaaggccgatgaacatttgttgggtgtggctacatgttcaagcagctcctctggcacttcaaccttggatactccattggacacgaatagctgtcatcgcagcgcagcattcaaaacagatcaagcaaagggcacagaaatatcctgcatgacaaggctactcagtgacgattcccggcatgggaatgattttgtcgaaactccccctgctgcacaaaaaatcctggaatcaggtaacctgctcttctactttgtattttcgggtagtgatttctttgatagcagtaccatgtcttctaacaatggcaatcatcatttatgttggctagctagatgcatgagcattggtgtccgcttgtttatgtttaacttcaacagattgattctggaagatgcacagcatttcatacttagatagatacactgctagttttgttatctctgttgctgctacctccagcctgtttgttttattaaggtgtcatgatgacaatatggtgattttcttatgtccgaaattccacagctcagaaactcaaaaaaaaaaaaatccacagctcggtacagagaaatcagggagaccatcaggcctgcctgcagttgccctttttaatgttgattgattgatcaccttgatcatactgctctctgcttattgtagtgtttttatatatttctcttttgggaattacagaggttttattacttattttagaattccacataaggttacttatgcaactgaattgactttctttatggaatggtagatttattggtcagtataccaaactgatgttaggttggatgtgatcttagcttagacgcactgtggtaatttgacatattatctttagacttcctggcatatgtgatgttttcttcctgtttctgaacctctaaagggtgctatactgaccaagtgattttcaccagaccatttgcatagatatcaaccttctggattgacagagaatcctacctggaaatccaataagcaaattcatgactcccggaaagctgagaaacgtgcacgcaaaaatattaagatgagaaccataagttctgttgatcaggagggcaagaacaggacaagagattctaatgatcgtgaccaccacaaaacaaagatagggaagcacaaagtagcaagagatgaggttgtccttttggagaaaaggctggagaagcattctttgaacaagcctgctgaacatgatactaaaatgcatattgccgtagttcctagtggtatggattgtgttggcgcagttcagcagcagcactgtcaaagcaagtgtgatcctgaagagtcattagaaaccttaagcaaccattcaaactgtgagagtggttcagtatcatctctagtgtttgagaagccactgcaggtattgtcgcccgaaaagaaaccgctgggtcatgaaagatgtcatgcagtgaagccaatcaagacgctgcatttgaaccccaccctttatgatgtggagttgagtgtgctggggagcagcaactcgggacgccgtgtgccccttgtttctctaatgagtaggtgcaatcgtaaacctgtcgtggggtatccagtctccgtggaggtcagtgatgatgtgtttgaccgtcctttatcaaggaaagatgtacagcagcctgctacaagcagtgtgaatggaatagtattgaagaaggatgaaactgagagtttacaatgtcttgtgccatcatcagcacagacatcccggccaaaacccaaaagccgcagcaggagggcatcagagaaggaagtggacaagttatggcagccacataccaaaaaaccagcttcctcgtcaagaaagatgcggaggctttcctcttttgcttcaggccagagagacggcgacgacaggaagtcggcggtggggaaagtggcaggcgcaactattgcgtgcatcccgctccgagttgttttcagcaggatcaacgaggcgctgagcttctcagttaatgagaatgccctagctgggtgcggggctgctccccggctgaggaggaggtgaggaatacttggtagctaggtgttgctgcatgttcacgtgctttttgtggccatgccataatagcattgggaaatgcttagtgtggcctatcacttggagcatggtgataggtgatgtatcatgtggttgtgagccacatcacacttcactcacagtagagaggcagtagaaggaaggactgtgctgaggcacccctcatcattaaaaaaaaaacatttgatggtctgtggagcacatgatctgacggtggaagcaaataaattagtgtaggctgttgattacccccctgcctatcttgtttggaaatctgcttctggtgttggtgatgcattgctgctgtaatgtaactacctgtgttggtacaggccaggccatcctaattggaattggaagcatcagcttctgcttgctctgtctttctttgttgttactgtatgttgtgttgcagtgggctgtatggtttgggctgtgcccaatattccagaaaaaaaaataaaatttgcagcccgtaacaaggatgggataccttgaacctttggaagagggagattctttgcttttgtgaagggtgaagagaaggcgaaaaaagtgaagtggagacttatcagaattgtggtgagtggcgcttaaattatcttctttgttatagaagtgttgcgattagattcgactgcaaccatctgcccgattcagatggataccattacatccatggtacgtatgttgatttgatttggggacgagcaagtagcgatcatttgcctgcgtctaagcaaccatgcgcaaggttaacgactcatggcaatcactgtcacttgagtttacgcagcacgccagaccattcacggtagctgcacgcaacaaccaattgggggtatggaggagttttaaacaggagtgtgacaca

SEQ ID NO: 4993 - DNA, 5588 bp, Sorghum bicolor
cgtaaaatgcagtttttttggcttcactgctttggagaaaaccgaagcccttgcaaagaggacctaaggatatatttggtatcttggagcatttatgattcagacatgaaacacaagaattggcactaaacgatttgaatgatagcgttccagaaacacagagaaacgtttcttctttttgcactacatggttgaatatgctaaaatgtggtttcacaccgatatatccttgtcgtcacctttgtggacttgcattgtatagtttaccaagaattaagtgcaacaagttaaaatggatttatttaagttgttcgttgtaaacaaaaaggtattaaaatttttgtgaaacatatttttatttataagatttttttattgaaaaagcatatgtttgaggaaccagaatctaacctatccgtcaatggtcttatagagtgattttgattcttcctaaacatttctggagagaatccagttctaaaacatttgtgcaggaatccgtcactaccaattacagccaaagtcttcattggccttgccttcatagtttcgatagaagtcccaagcacggtttccaacgctaggccttttgtgtcaatgcgtgtgttagggcactcacaatgcagactctatcatagagtctaaagttatttattacctcgaacaatgtggacttagagtctaaataagacttgtagttttgttttttctacctctttcttcaataaatatgctgccacatcagcaaaataccataaataatatgtaattaattgtcttggactctatgatagagtcttgcattgtgagtgcccttagtgcgacttcgatagcaaatttgggattaaaaaaaaatctaaagtggcaaataattaactaacaagctgtcccaaagtaaaacaacatgaattaagcataaatcagcttatcccaaattaaaggtttgtttagttaaagtttttaggtgttatattggatattacataataaggtatcgcatgaggtatttggacactaataaaaaaaaataaatttacagaatccattagtaaaccacgagacaaacttattaagtctaaataatcgatcattagcacatgtggtactgcagcaattagtatctaatcatgaactaattaaacttaaaagattcgtcttgaaaagtatttgcaatctatcaaattaattattattatttatttatatttaatgttttatgtatgtatctaaatatttgatggaacatggtgtaaagttttaggatgataactaaacaaggcctaaaataaacatatagctagctgatcatgaattattcaagtatcgctgtcactctactactggtagttgatctatggtgtgcctagacggccatgactagttcatgagcacaactagtgactaaaatatcgctctcaaaatgatgtgaatttgtttgttctttcgtacatcacaacaagcgtcagtcccaaaatatacctacatcctgcctgcgaagccatgagaatgatccattctctccctccaatcccaattcgaatgccaattccaatctgcactgcaggctgcaaggtgcagcagcgcgctctctagctacgggctccggctctccctgtctgtccagtccagcacgatctcacctgtctgctgtctgtctacgtactagtatatacgtactcccgtatactatactccatgtgagagctagatagatccatcgcattcgcatcagagctcccagcggcccttcttctttctccagcaagcagcagcagcagcagcaggcccggccgcccagttggcaattgcattgccgtgatggtgatctgatttctgtagccacggcgacggtgacgccgtgtgtgacggtggagagcaaggagctggagctgggtgactgacgagcaaggcccacccaccgtaggtgaacggcaaaacccaataggcaatgcctgtagctgcaggcgcggctccagctccacacacgaggaccaacgcagccctcggccccccgctttcctactggggcggcgccgctgttggcgcagaggagcagaggtggcgtatcggcatggactccgccgccgccgctctcctcgactcctccgcctccgcctcttcctccgccgccgccaacggcaacgccaaggagatgcccgcccgactcctcgcccaccgcaccgcccacaacatgtcctcctcctcgctccgcaagaagtccgacctcgcgctcctccgcaaggtcccctgcgccacgctccgccgcctcctcgacaacttccaggaggtcctgctcgccaccaagctcgccctcctcttccccgccgtcctcctcgcgctcgccgcgcgaatcttccaattcggccaggcaagccaactcctcctccgatcctaccgtcatcgcatcgttttcccctttaatttctcgctcgtgtattcgtatgtgctactccagttcgatcaaaatttgggcatcttcttcgattgatattctctgcatcattcaacgcgcacagtcagaccggccgggagacagatattatacattgtttttttagttatacgcactgtattgtatgtatataaaaaaagagcattttgatcacgccagcggccagccaggcccaggaggcatgattgcatccgcttcatgtgccgcctcaattctcaccgctctcttctctgcatctcacatccctcttaccagtctatttattgcctgccagccacttcccaagcacattcccaaacaataaacaaccctgcaactgcaactctgttgcataaactacccatccaagtcaaagaaaatacaccacccacaaccacaacgcgtgaacagagaagcagactctcgctccgatgatggctacaatcgcagagtatttgtaattttgcatacatacatgtgaccatgtgggctagctagcctgttgctgccaaattctgttcggtctgacacagatggaatcatggaatgaaatactagcaccacaactaaactaatccgccaatcacatgcatgagcatgcttcccctacgtcctatctaacaccttgtcggtcctgctctacttgcccatctactcaccagaacatgatttattattcttcatccgttcacccaatattctccttcattctaccccttcagttttgacctcactcacaaatgacacagttgacaacacgacagattagcttcaggttttagctccagctcagcagattgacttgactttcactaggcacaacagtgatatgtagttcttcccatgagatgtgaattttgcaacaggacaaacttctaccttgtcttttcaccgtggtcctgctgggcatgtgaactagcttgcacacgtacaatgttcttctctgtcctcgtccaaacacatgagtgcatgatatacaaacaaaaggacagattggattgccccaaatatgaccttgctagatgctgaatgggcctcgcttcttttgttccattgccacttcaccatcgtttgcttaacttcaacaagatacaactaaatatacgactccatctcagtattgcattccaatggaactaaaactgatcgaaacaagtgatgctttgtagccaatgtgtgattacgcccatatctccccttccgttttcttaatggatgctttcttcttgaaactcaacaggaatgggtctttgtgcttagcttgatcggtctcgttcctcttgctgagcgacttagctttctgactgagtaagtgtgttctgctcattatcatactcataccatgttcttgatacctcctgttgattaatatctttccgctatatgtaatatatgttaatgttgcaggcaggttgcgttttacacagggcctactggtaaaaaaataaatactgtcagattcagtcttcttatccaggccagaacctttgcattgtttcctaacctgccccagtaaattgcagtgggtggactgttgaatgcaacatttggaaatgtaacagaggtcatcattgcaatctttgcgctgtatgaaggcaaggtagtggtggtgaaatgctccctactcggctcagtcttgtccaacttgttgcttgtgcttggaacctcccttttccttggtggcctggctaaccttggaactgagcagctatacgacagagtaaccaactcagctatttctcactattattaagctgtccttgaaaataccaaaagaaattttttgtcttactacgatgattatatggttttgttgtgtacagatgcaagtagatgtcagcacaggacttctgattcttggtgtgctatgccactctctgccactgatgctgaggtatgctgtgagctccggggagcacgcggtatcttcttgggattcagaactggagctatcccgagcatgcagcattgtcatgctccttgcctatgtagcctaccttttcttccaactgaaaacccaccgccaactctttgagccccaagaggtgtgttctgtgatatgttgctgattgtaaccaccaggagctgctaacattgaaccagttggttaatatgactgcgtgatccaatcaaatgtttttgtaggtcgaagatgatggtgatgattcagtctctcaagacgaggtggtactgggattttccagtgccatgatttggctgggggtcatgactctgatgacagcagtcctatcagagtttgttgtgagtacaattgaggtatccatcatgcagtacaatgccatgtttattttgcccatttcagtcaacacatacactattgtaggttgtactgcagctagtggttttctgacagagagtcatgttaacaggcagcatcaaaatcatgggaactatctgtcagcttcattagcatcatcttaattccaatagttggtaatgcagcagagcatgccggtgcagtcatatttgcttttaaaaacaagctggtagggaacttgaggagctcttggacactcgttgcaatgttgtggtagcatctactaacagaacattgttggttcaaacaggacatcaccctcggagtatctttgggttctgctacacagatttccatgtttgtggtgggtgttaactaaacttgtagagatagttccatgtgcttttttgcatcagtaaactttaatggtggaagcaaaatgtgctaggtgccattgagtgtccttgtagcatggatcatgggagtcccgatggatcttgatttcaacttgcttgagactggttctttgtttcttgcagtattagtaacggccttcacgctccaggtatttttccccctttttcttttgcaccctccttgatgcatcttaaacatgattgatagcatggatatttcattagcagaacattcataaatcttggttggttagctgtatgtgcttattttatttatgatgaagaaaagaaatatacattttgtgctgttgggctgtgtccttgtttctagggtgcagcaaaatttaattttctctaggaatcaagcccattgatgtgctattactggccataggagtgctgtcaatattgtggtattagccctaaagagtgaccactcgtttacgcgttttgcaggatggat

SEQ ID NO: 4994 - DNA, 4226 bp, Sorghum bicolor
  misc_feature (1)..(716): n is a, c, g, or t
nnnnnnnnnnnnnnnnnnnnnnnnnnnnnnnnnnnnnnnnnnnnnnnnnnnnnnnnnnnnnnnnnnnnnnnnnnnnnnnnnnnnnnnnnnnnnnnnnnnnnnnnnnnnnnnnnnnnnnnnnnnnnnnnnnnnnnnnnnnnnnnnnnnnnnnnnnnnnnnnnnnnnnnnnnnnnnnnnnnnnnnnnnnnnnnnnnnnnnnnnnnnnnnnnnnnnnnnnnnnnnnnnnnnnnnnnnnnnnnnnnnnnnnnnnnnnnnnnnnnnnnnnnnnnnnnnnnnnnnnnnnnnnnnnnnnnnnnnnnnnnnnnnnnnnnnnnnnnnnnnnnnnnnnnnnnnnnnnnnnnnnnnnnnnnnnnnnnnnnnnnnnnnnnnnnnnnnnnnnnnnnnnnnnnnnnnnnnnnnnnnnnnnnnnnnnnnnnnnnnnnnnnnnnnnnnnnnnnnnnnnnnnnnnnnnnnnnnnnnnnnnnnnnnnnnnnnnnnnnnnnnnnnnnnnnnnnnnnnnnnnnnnnnnnnnnnnnnnnnnnnnnnnnnnnnnnnnnnnnnnnnnnnnnnnnnnnnnnnnnnnnnnnnnnnnnnnnnnnnnnnnnnnnnnnnnnnnnnnnnnnnnnnnnnnnnnnnnnnnnnnnnnnnnnnnnnnnnnnnnnnnnnnnnnnnnnnnnnnnnnnnnnnnnnnnnnnnnnnnnnnnnnnnnnnnnnnnnnnnnnnnnnnnnnnnnnnnnggattcccaataacagcagatttacaaattttcctcgtctcaggatgcacaaaatgcttcctgtttttgcgccgccgccgtctccccacaattggaaagaaaaaaaaaatgtggctttcctttctattttgcccccactccccactctgcttgatactcatcaagtactatatataattatatgcatgtgcttacttggtaagggtaataatactatataagaaacaacttaacaaccctttgttagttggattctctcttcgatccatggctttatttgcaatagcagcttcagccatcctttcttttttcttttcttttttattcacaaattaagcatgacttgtcttctgcatgatcacctgatggaaagccttcttcccaaataaattaaacaatcttccatttcttgtgtaaatagaaaagcaagtggtcaattacaacactgctagaaaaaatatttgttgctgcctttctggttctgaattttcgtatgcttttgcttccaaaaaaattgctaaacgaaagatcccatgcaagtatatgacgcctgtggtttagttatttatctttttatttatttcttccttctataaaactaatagattatttctgaataagaatcactcgtgttggctgcaactttttcggggtgctttctgttttgaatcttctccttctgaccttcacatcttccaagtcacacaaaggccacacggtttcagatatttagtgtcccctcttctataagaggggccgaattgtagtgtcccctcttctataagaggggccgaattggttcagcattcacttcagtttttgccctggatttcaattttttttctttactgctaatatggccgaccacactagtatatgctcccagagcacgatggggacttttaattacagtagttgattgccatgtgcgtcagccgatacttgctaatactatatctctcttctacacgtcctactcctacccctcaaagaacttgtctatcactgcaacttcacacagcaggtcaatacagacaagacaaaaccaaactaaacaaagcattggcaatggtgatctaccacaaaatattttattattaccagatactagcatcttagcaagattatttcattctctgttcatcctactaacattttatttagacatatcgtcctttccaactcatcggatttcattcatataccgctatgcttctaattactatggtgtttatcatcttctagcccattggaaattgttctcatctctgttttgttactggacaggtgagcttggtacagccatccatggtatcagaatatgacctcgtgatgagaaggggacctgttcaaagctccagaagccatcatcgatgaaccgctgctcagccttgatcctgtcgcagctgcgttttcaatgatgactggcaatgaaagtgccatggatcaaactatcaaggatgcaggcatcggcaccatcccaaatgaccctctcctgagtgaagtgttatatgagtgcgagaaggaactcatggagaagtctgcaatcgaagagacaatttctgaacttatggatgttaagattcctatgctgcaagttgaagaaatcccaagccaagctgaacaagttcttatacagacccaactcccggccatggagaaagagaagcaatccattcctgaatgctcgctccagaaaagtgttagttctggatgcctcaactcagcagattggatgaatggacctgtcaggccaaactttctagatttccaagggctggactttgaggcagcatttgggatgaggagagcttacagtgaaggagacattcaggtttgataagcatctccttttctcctgtactattttatattctaacaaggaagtagttatcctcgttatgaggaaaagaacgcacttacagcataaaagtcttttctgtaacacagctgttgagaaaagaatcgttgagaagcaaaccaaaaccaaaaagcattgccttttccattgccctggccatgcttacagcaatgctttgctcaaagtccgtccaagctatgacacccatctggcatgttactatatctgcccaaagcaacctttttttagtttttttttctaggtcattactttagctgtccaagctttcctgttctgcacagtattctgttttctttcaacctacttttgtgtgcaagatattggtacggttccatcacctcagtacatgtgttgtcgcgattctgtgttgaaggaatgtgcagatagaacatctatatctggtagatgcttgtgcagcagcaatttgctaggcacttaacatttccatttttgacagaaccttggagccaacacgcctcgaccagcggcgcacgcagcaaatgctcaaacgtcttgtgagaggcttgtaaccatcagtgacctcaagactgaagaaaggaagcaaaagctttccaggtataggaagaagaagatcaaccggaattttggcaggaagatcaaggtattcttctcagccactgtaaaaatccagcttctaggctttagcctgatgagtgcacggcccagatggtaacagatagaacattttcctttgcagtatgcttgcaggaaggctctagcagacagccagccaagagtgcgagggaggtttgccaagatcgaagaatgcgacctgctgaaaccaagcgtttagatggtggcaaaaacatgaaaggaatccagtcgagagcgagcttcatggagctttggcttctagaagcttctaggcgctccgccttctgcgatggaggtggagaggcaccgcgtagcccgtcggaattcatttagctgttcaattgacctcttctgtttcactcgggctgcgttctattctatttcccctgtgtaataatatccggtcctttggtgcaagggagtgaagagctgaaagtggtagtctagcccctgtacaaaggcatggcaataaaactcagctcccctcttgcttggcatgttattatatatctcatctgaatctggctcttagcattgcactcctcgagctagccatgaacatccaggctagaagacactgaatattgctcgcatacccaggggtggtgaaaggaacggagattccaaccaccaaggaaagggaaaaccgacttgggtacgacaaatgaatatggtttcgatgctcatgatggtattctgtccatcaaagtctcaccagaaataatgtctaatcccatagctccagaataataatattatgtaccctcaccccaaaacaagagcagaaagcccgtaagctaccatgatggtagtgatttgtagaatagatccaaagtctcaccacatgtctaatcccatagctccataataatatctaccctttcacccaaaaacaagagcaaaaatagaagtgagccatcatggtggctgggatttgtataatagattcacaaataatgtctaatcccataactctgttgtcaaaaaatcccataactccagaataatatcta

SEQ ID NO: 4995 - DNA, 6385 bp, Sorghum bicolor; identical to SEQ ID NO: 3426
  misc_feature (3844)..(4866): n is a, c, g, or t

SEQ ID NO: 4996 - DNA, 823 bp, Sorghum bicolor
cgtccacgcctcacaacggcgtcaagtattcgtgcaccggcggctacaagtggcgagactccaagaaggcagaccccaacctgctgacgggcgccatggtcggcgggccagacaggaacgacggcttcaaggactcgcgcaacaccttcgggcagaacgagccgacgcttgtaggcaacgccggcctcgtggcggccctggtggctctcaccaacagcggcaggggagtcggcattaccgccgtcgacaagaacaccatgttctccgccgtgccgccaatgttccctgccgcgccgccgccgccgtcgtcatggaagccgtgagtgctaccggatcagctagtacggtggttccttcgtttggtcatacgatttttggtgagcgagatcgccgatcatgtacgcgcgcgaattcttttgtacaataccacgttaacaaatacgtactgcgcacggtggcatgcatcatgcgtgacctgtagatgtttttatggattacattacagttaatgaatggatggatacatatcttcgcaatcaatgttcagttagttcgtggttccattctctcacacaatgctagctagtaattctgattaatttttggttgtaactgaccgctagatctaaaaccagaacacacacgattccaggcagagtttggtttgtggtcaagtggatgtgaacatgttcccaaagttccgccaaaattagccttgcaaggaaaagcaaaagcatgtcggacttttcggaaaaatcagaagcatgcgaaatgacagctcgaaaaacaccacaaatttattatttgagagccgaaattggta

SEQ ID NO: 4997 - DNA, 3073 bp, Sorghum bicolor
acattaggtcaactcatcacctgaccatttaataatatattatataagctcacgatagtcaacttcatctttcagatttgaagcactggaggtgaggagcaggtcagggagcgccaagatctcagggacactcatctccctcggcggcgcaatgatgctcaccttctacaagggttcagcactgacccacaccaccacatcgccgtcgctgtcatccatggctccatcctcctccggcagcagcggcgagcacggcacggtccggtgggtgctgggctccgtctccatgctcgccaacgtggtcggcttcgcgctgtggctgctcctgcagcggaagttcacccggaagtacccgaccgtgtactcggcgacggcgttcatgtcgctcttcagcttcgtccaggccggagcgctcgctctgtcgatccagaggagcagccttgccgtgtgggctctcaggggcaccctagagatcgccacggtggtctactgtgtaagatttcttgtcttgcagactgcagacacatttgttactgctgttgatgtgctacgtgcttggatttagtatttgctaattaatctccatataaactaattgggcagcattgatgatgcagaatgcatgtttgtgcatgcagggtatagtggcatctggcattgggtaccttctgctcacatactgcgtggagaagagaggccctgtgttcactgctgccttcagcccgctcgcgcagatcttcgtcgccggcatcgatctctccattctccatgaacctctctaccttggaaggtgagaggtcacaacgcaatgctgctcatcccatcgatctgctacctaactgcagcctcattttcactgaagactgaacattgtgccgttcctcactgaacattcaccctagctaactgttgctctgttttcacgttgcagcgtgctaggatcagtgctggttattatcggactctaccttgtgctgtggggtaagaaagaggaagctgctgctgctgctgcttcggcgaagccagttcaggagaccgaggtagaacagcaagagaaagtgtgattctttttattactcatcacagtgtgacagagcagagaccatacagttagaagaagcctgtgtgagtgtgacagagtgtatatgatctccaagctcttactgctgcttgtattctactaggtcatccaaatatatctcttaatgctgtaaataaaattctcttaaggccctgtttagtttcccacccaaaaatttttcatccatcccatcgaatctttggacacatgcatggaacattaaatatagataaaaaaataaactaattacacagtttagttgagaatcgcgagacgaatcttttaagcctagttactccatgattagccttaagtgctacagtaacccacatatgctaatgacagattaattatgcttaataaatttgtcttgcagtttcctgacgagctatgtaatttgtttttttattagtttctaaaaacccctcccgacattcttccgacacatccgatgtgacatccaaaaaattttcattcccaatctaaacaggccctaagtgttgagaaagaggctgccaaagttcaggcttcactatttcagagctaacgtacagcactatcgactggtggtacggttgggccaccatccacgtgtacgtcgctgacaagtgggtccagagagcctcatgtcgctcaagaatagcaaagcactctactactagtagctgttgaatggttctgctagctcgctcggtcagtaaaggtctctgcatcagacacttgtctctcccgctccgacaacaactcctcgcctcccagctcttagcacacatctgggcgataaaacacatagttgcattcattctacaccagcaagatcagaaacagtgtgcgtgaatcatatccagcacgatcggatcgaagaacgaagccatcgtcgtcacaacgcacaatgcaagaacgccgccgcaccgccgccatgggtggtgtcaccgtgacgacgccgctctgctacctggcagtggccgcggcctcggccctgcttctgctgagcaccgccgtggcgccgtgcagcgcgcaggtggtggtgaccatcgaggaggcgtgccggatggcgacgagcggcggcgcggggaaagtgagctacgaccactgcgtggcgtcgctggcgtcggacgcgcggagccgcgacgccgcggatctgcaccacctggccgcgctggccgcgcggatcgcggtggagcacgcggcggcgacggaggccaagatcgaggacctgggcgaggtggaggagagcccccacgcgcgcgcgcgcctgcaccactgcctggacctctacaacgccgccgccgacgtcctgcgcgacgcgctcgacaacctccacgcccgcgtctacggcaaggcgtcccagcagctggccgccgcgctgggcgccgccgagagctgcgaggacgtctggaagggcgaggagcacgtccccgtcgccgcgcacgacagggagtacggccgcatggcgttggtcgcgctcggcctcaccagcggcatcgcttgatcgcgcctactacgctaatgctgtcgtctcatcgattcatcatcgcgtcgatcgatcggtccattacacttgtcagcccgaacgccattgacgacgccatggctgtcgtcaagtcgtcatcataaaagctatataaagtcgcatcatctgtctccttggaagttggaaatataatcctgacatgcatgtatgtagaaagggcatgcgtgcatgtatgtagggcgatacatatacactcctatctgttgttgttcgttctttgggtttgtaggactttgaacggttgcatggtggtaagtatataaatcacatcttgaatgaactaccacacaagatcttgcaagggctaattcccccctctatttctgtttatcttatcatttctattgtcatatgatctttttatactattactagcatggcttgagcatcactgttggtgtagtagagatgtgttatctatcttgatttcgacctcgtttgacaatatagttagtttt

SEQ ID NO: 4998 - DNA, 3198 bp, Sorghum bicolor
ctgccaagaagagaagagcaagagacagggtggaggtgtgagcaagagacgagggtctattggtctgtttgtggtctgtgtcggtgaagagaagagcgggttggcgcgtgtgatgtgattgatggaggccgtgatccgcgtgcttaagtttttttatgatccgcgtgcttatttttttctaactactttatatttattatacatacttattgtatactagtagtagtttcatagggttgggaagcccatgccaagaaaacaagaaaccaaattacccagtgagctgcagctgctgcctatcctgtcacatcatttttgttcgcttaagcttatcagctgaatgtatcagccattcaacagtgttttactctcacaacaaatctagcatgacttattagctaaacgaaagcccgtaccaatctcaacctttcagtcaccgtccttgtgtgtttaaaacacgtgctaggtgaacagtggaacgaaagccacgctccctttgtcccgaaaagaaaagattactattctaagaaccaaattatcttttaaaaaaataattaagtctatagaaaataatattgatatttgtgttcaaataggtttactataaaaatatattcataattaatttaacaatacttatttgatatcataaatgttactgtacttttttaaggtctagctaaatttaaattattttgactcgccaaaaatggaaattgttttttttccttggtacggaaggagtatttgtgaagatctagcccacaacctggtaccgtataaatgggcctccattgcattgggtctttcggcctatccccctatactactagtagtagtaaaggcatattttgttggagccagcccaatattaacaatgtcaatcctactggacaaacaagcccataatacatttggagcccgctacggctcggcagctcggcttagcaacattctaggacaataatttctacaaaccttacatatgtggtggttaaaataggcagccatgggcaatgcgttttgttgtttgctgagatcctttgaagttaatagatgatgcaaagtttaataatcaccatgggaaattgcgtcaggtgccctcttcacttgctaggtgcacgtagtgattttgaagcctaaaaaatggtctgagttttccctcgtttaccttttgcaaccattgatctttgtgaaagccgtgactgacattgtggatgggaagacaccgacggcagagtttctgcaaatgtggtggacttcgtcagctggatcggatccagcgtatctctgatctctgaaagctctagctgaatgtggtcatgaaacccaattgctaatttgtgtggatatatgtctgactcaattgttatatgcccctagtacttttgaatggttgcatacttgcactggctgttgtgagatgccaaaaccagagcagtcatgcccctctgtctgctgcaagtttcagaaagaatacgcaatggacaaacacggggtgttggcgatcagaataacaagtgcctgccatgcccttccatgtacgtagtgaacaaattaagggccgtgcgagccaggcccgttggttaccctgaccagtgctaatagtctgaccgttggcttgtcttatgagccctctgtctgctgcaaaacagaaagaatgcacagtgactctgtgagcatcggtgttggcgatcagaatgccaggcgcttggcattcccctgtacagtagttgtggtgaaccgtgcaggccattgaccagtgctggtaggtgtcttccatttaagatggttctccattctccaataaagggccagccaaccaagaggtgagtgaggcaatccgtcagcgatgaaatgccagtgcaggagctctcgtcactgaagcaagaacctttgccctcttttctctgcctgctcaggtactcctggttgcatcgatcgtctgcatatgctttcatttttcaagtctttctgcagagctctttgctccgtgtcagatggagatccctggctgtgtatccagcatcaatcccaaggtggagccttgcgaggacgaggaaccgccattaccgccgccgtttcaagcttcatcagacgagtgggaggtgaccccgctgtccggcgacaaccccttcttcaccagcgtcatgtgcaagagccaagtccagaacccctttcagctggtagtacacgtacacatccccatcctactgtttccaatcggaatgcacacacgcacgcacgcaagcagctcgttgggagtgagagcgtgacaggtcttgctgaccgtacgtttcaggtcatcccggttcgtttccaccgccacctcccggagacgcgcgcgccggcggtgctaatgtgccgcggccggtcgtggacggtgagctactgcggcgtcggcaagtggaagaggcttcagggggcgtggagggacttcgcccgcgacaacgggctccggctcggggacgcctgcgtcttcgagctcgtcgtgcccactgccgccggtgccggaactgaagctgctgctgctgctgcaagtgaaagagacggaaacgacagcagcggcagcagcaaggagaaggaggggaagacgatggaggtggtgttccgggtgcaggtactccgcagcggcctgccggaggagatcgcctcccggggcgccacctccgacgacccactcgtcatcctggactaactagatccaactgctgccattaacgttactgttggtggttgaattagtattagtagttggacattagtggttcagtgcagtctgcttttggtagcatggtagtataagtactttgtttgcccctgctgatctagctaagctctctgtttagtacattctttgtcagtctgtctgatcgatggatccatcatcctgcaaaaatgtagtcagttaatgtgtatggatgctaatgataagtagtagttgtagttcttcatcgtttctcaaactgcactactgcaacgagctggctgtctaatttgggtgcacaattgattcctctagtgttcagcttgttacggttttaattacctcgttcttggggtgcataatccccaacagcggccactactagtgtgtgaggccggccaccgcaccagcggttgatgagcacgaagcaacgcatcagagatatttaaatatttgccacggttatggttggctcctctagttttagaacg

SEQ ID NO: 4999 - DNA, 7582 bp, Sorghum bicolor
atttggggacaaatttttaggccagaaatctattctttcagggacggagggagtattattcaatcatagactaactagggtcaaaagattcgtctcgtgatttacggtcaaactgtgtgattagtttttgttttcgtctatatttaatgcttcatgcatgtgccgtaagattcgatgtgacagggaatcttgaaaactttttggatttcgaggtgaactaaacaaggccttggtttaaaatcatacctatatctctatttatttatttatttatttaccaagagttagtggtggaaatttgcatttaatgactactaccaccacctgcagcccccactagtgaagctctgctacttgatggcccacctgcagtcacacagtcgcgggtggaccatttttcagctgtgctgggttgccacttgccagccagtgttgacgagagacataaataagtgggaggggaaaaaataaaataaaaaaaaaaacaaaagcaaaatggctagtgggcgtagctagtggagggctttggttaacgccttccaaaactagccgttgctcactccacgccaacacacccacgccacacagccgctcccttcatttatcatttttcactcccctcttctctcgctgctctcctccgtctccgcctccgctcgagaaattcaaaaaccatactccttcctatcctcctccctcgcacgcgcaggcgcacccgcgagggcggcggcggcgcttgggctgggctcccccgaccgcctgcctcctaggagaggaggctccctgctccgcctcgggtgcgcgctcctggcgacgactgctcctgctcggctcggctcggctcccggatcgcgctcctccccgtcccccggccccgtcgcgctggtgagtggtgctgttcatcctccccgcctccctctcccacttcctcgtttccttgcgcggcgcgcggcggttgctgctcgccacctccccactcggtcactcccactccccgcgcggttggggttgatggcgtgtcgcgtccgggatgggtctgggtgggtgggccgtcgctggcgtcatccgccgccgcccgatctgctcctgtgttgtggcgagggggcgcggaccgcggggcacgggcggcgcccccccggtttccccagtggcgcggtagattaggaaaccggttatctctgttctgagtggatttgttctggaaaggaaggtagtttgcttatccgcggctgctcgattccgggatttcttatttttggtaacgcgagttcttcggattgggtttccatatcatgctcataaatccgatccactcactagtcactactggtatccacgcgtcccgtggtgtctcagtgcccactagttttgtttgcgccccacttttgacaagggttcggatcggacatcatctcgaattcgagatgcagattcctctgtgggggattttgcgagatcctgggatcagcatttcctcgtctctacgtccaggcgagtctagaacgaatgctgctcgtgacgtgacatgagcattcaatccagtacggatttttgcttacattgaaattgctttgtttgttcttgcatgaatcagtggaaattagagctgcgttttcctttctataatataatatgcagggtgtcaattttgcagcatttgaaattttgaaggttggtgcctagatccctgtaaaatactactctactaacgtctgtttatttctgctgctagaaactaaactaaacatttgtttatttggattcgaagttaaggcattttagaaaatgtctttactagtttgccagcaattcggtttatgattaatgatgcaatttgttttctattcatgtgattgcatataataaattacactcgaccgttgttgcattttggcacatgcagtgtcttctttcagcaagaatcttgtgacaagacttccagttccttattcaattcctgaaatctttgttttagattataaagcgaggaatacaaaaaaatgggcgtgtcaaggccgccaagcacccctgcatcaaagggtgagcacacaccgatgtcgactcctggtggtagctcaagggccaaggaggagaagatttttgttacagtgagggtgaggccactaagcaagaaggagctggctgtgaaggatgatgtggcatgggaatgcgctgatagccagacaatcttgtacaagggccccacgcaggaccgagctgcaccgacatcttacacttttggtagcatggcttgatcaattcgtgagaaatgcaactcgagaaaatctgtttgcaactgatcgatgtctttgaattcctttccttccagataaagtgtttggacctgctagccaaacagacgtggtctatgaagagggagctaaggatgttgcaatgtctgcattgacaggcattaatggtaggttaatgctcagtttgtacatttgtggtagtggagtgatcatctgcaactgaccccttaccccttgtgtttgttttgcagccaccatttttgcatatgggcaaaccagcagtggtaaaacattcacgatgagaggcgttacagagagtgctgtttgtgatatttatagacacatagataatgtgagtttcataaatctgaggaagtcattgctttttgctgctatggtatattgctttctaagatgcatgtaagtgttataactcataattgttcttgtttagactcctgagagggaatttgtgataaaaatatctgctatggaaatttacaatgagattgtgaaggatcttctacgacctgactctgctccccttcggttgttagatgatcctgaggtttgtttacaactttgtcagttattacaatggcccaagaaaaaattgatcttatagtgaactaaatgaaaatattttccgtttgacagaaaggaaccattgtggagaagttgcaagaagagattgctaaggacagccaacatctgaggcatctaatcagcatttgtgaaggtaaatactaagtgctgtcaaaaaaagaagaaatgaatagtgctaatcactttaacaaccttttgaatgattgcagaacaaagacaggttggggagactgcactaaatgacactagttcacgttcccaccaaatcattaggctggtacgtatcctgtttgcattgagccattccaggaaaaacatggtgatggaagtattaatattttgtggtgtatatctttatccagactcttgagagcaggctccgtgaagtttcaggatgtgttaaatctttcgttgctaacctggtaagcatgatatcctcaaaggtcttgtgtattgctaatgatgctgatattcataatatcaataattgcttcctttgcttgcagaactttgttgaccttgctggaagtgaacgagctgcacaaacacatgccataggtgcaaggctgaaagaaggttgtcatataaatcgcagcttgttgactttgactactgtcatcagaaagctaaggtagaattcaaaacacattaaagcatttctggtccatgaattcatcttgctaaacaaaagcttctgagatgtcttcttctcagttaactgttttgctggtatattcaattttgttctagtttggccttcagcgatcaataactttaggtttggtgttagataaatggtgattaaagatgattgctacattcagttttcaaaataggatatctcacacgttaaagcatttgtcacgttaaaataaatgttctacaaacatgttgcttcattagcttattttgtatcagtggattgtcaatgatgtagaaataaactccacctaataaatgaaattgtagtgctcgtatggtcgccccaaagctagatgacatgtatttggcatcagtgcaattgattgattgagagtgacttttccagtccttcatgaatttctcatgtagaaaaaatagttagtagtgaggtatactgtgtggtttaaaggactctcggtgttcttgagtgttctgttattctgcattacaaaatcgtatatcacaattgctacttacagagaaaatgccagtcttatttgcaatgcatacacttgatgaaatgtaggtatacaagatgtaagcattcacattgtatgaaatagaaaggcatgcattgtttccaggccttaatagaaaattcaagcgacaaatatccattgttatttgaaactgaaacttatctgtaaacttcaattgcagttcaggaaaaagaagtgggcacataccctacagggactcaaagctgacacgcattttacagctttctttgggtggaaatgcaagaacagcaatcatctgtactatgagcccagccctgacacatgtagaacaatctagaaatactctattctttgcaacctgcgcaaaggaggtcacaaatactgcaaaagttaatatggtaagggtctgagtcgtgactctgagacaacatttctttgtgccttaataattgtttaaatacatcaatgtcaactcaacaatacattttccatgcaggttatatcagataagcaattggtgaaacaccttcagacagaacttgctagactagaatcagagctgaggacccctgaccgtgctgcctcttctgatatcctcataatggaaaaggacaggaagattagagaggtttgtctctgacaaaggtttcatgttcactttgaactttcaagagttcactaaatactttaaatcattgccatttttacatgatctaatccatgaattctgcagatggaaattgaaatagaggaactcaggaaacagcgagataatgcacagtcagagcttgaagaactgcggaagaagaagagtgatcaccagccagtaagaatctgcctttgtttgtcccaaacttttctttattaccgttaattaaccctttggattttactcaactattgcaggggtggaatccctttgattcgccacaaaaagcacgcaagtgccttacattttcaggatcactagagccaagtaacaaaatcaagatgatgaggagctcgattaggcaatcatctactgctccatttatgttgaagcatgaaatccgcaagctggagcagctacaacagcagcttgaggttgaagcaaaccgcgccatcgaagtacttcacaaagaagttgaatgccacaagcatggcaaccaggatgctgcggaaaccatcgctaaacttcaggcagaaatcagggagatgcaatctgttaggtctgagaacagagacgtggagatgattacagatgaaggaaatggatctgatttgaaagatgagatttctagacttcatatgcaagacaatgatattgccaaacttgaggcgaagttagaaaatgtgcaacggtctattgacagattggtgatgtcacttccaaatgttgccatgccgtgtaatgagactaccccaaagtcaaacagatcaaagaagaagaagaggctccttcttcctctgggtgtgagcaacaacatcaacagagcaaatcttctcagagcaccttgctctcctcattcttccagtaggccttcagaatcagaagttgagaacagggccccagagggtgacactatgtctgttgagggttcagaaaaggctacccccaccaagagtgaagatggagatatatcatctcgtgacgaaacaccacgctacaggcgctccagttcagtcaatatgaaaaagatgcagaggatgttccaaaatgctgcagaggaaaacgtgaggagcatccgggcctacgtgactgaactgaaggagcgagttgcaaaacttcagtaccaaaagcagctgctagtctgccaggttttgaacttacttgacctttcttccaaaaaaaaaacattgtctgctttcctgctactaaaatatgttccattactttattttgcaggtcctcgagttggaatctaatgaaggcaagtcgaatggagaggataattctgggcctgtacaggatggtcctgattcatgggacagattattcaaggagcagatgcagtgcattattcatctgtgggatcagtgtcatgtatcgatcatacacaggacccagttctacctgttattcaggggtgacagggctgatcagatatacatagaagtcgaagtaagaagactggtatggctgcaacaacactttgctgaggtcggtgacgcaagccctggcgctgttgatgaccctgcagtttcacttatctccaggtactgaataactagtacaatagcgtcaaactaacatactgcttgttttctctgagtttcactgattctagttccagcattaagaagaaaatatctagtgctgaagagtaatataaccgaaataaaaggaaaacagtgtgtttatatacctttcagccatagtataaaaggaaagcattgctgtgttcattagttagtacgtataacagagtgttttgtctgttgcagtatgaaggcattgaggaacgagcgagaatttctcgcgagaaggatggggtcaaggctgacggacgaagagcgggagcgcctcttcatcaagtggcaggtgcccctggacgcgaagcagcggaagctgcagctggtgaacaagctctggacggatcccaacgacccggcgcacattgaggagagcgcggacctggtggctcggctggtgggcttctgcgagggtggcaacatcagcaaggagatgttcgagctcaactttaccgtccccacgagcaagaagccgtggatggtgggctggcaacccatctcgaacatgatcagggagaagacccagcagctctggtgagaactgaatcaactgatgtgctggcctcgccgatgttgtacagatggaatggaacaagaaacagtacatttcgtgacggtcggttcagctctggaaattgttgatcaatgggggaagcgtctcaacttccttcccgacgactgatcaaggccacaagccgtcggtctggtaccctcttcctttgtcctgtgtagatggtgaattcgtggagtccagagagagaatctgaatgttctcgcattctttacatgttttctttccatttacgccaagttttgtttgtacattttgttttatggtatgatctggatctgatgagtcgattcaaattcttttgccccctttttcctgctgtctgtgtctgtgcatcgggattgccgattcttgttatcttattgtcaatcacatcacaaataccccgttcggtcggttggggccattcctggccggaacgtatcctggtgatgcatggctgtacaaaatacagtagtgtttacctgaaaaccgaacgtgccctcagagtgttttcacatactctgacgaagaaaatcatatactatcagaacaacgctcctagttccatttaaacaagaatcgaaattcagagtctaacgcataaaattttgtatgattttcttcgtcctttctgtcttgaactgtttcatcgaaagggaaattcagagtctattctcaggctaggcaccattctcatcccgagcaactgcttcaacctacctgagtgtgagttgcatctttttctaaacctttttttgtagaacaaaaaggaacat

SEQ ID NO: 5000 - DNA, 2650 bp, Sorghum bicolor
aaggagacagaacaagtaacgggcaccatgttcacatcaaaatctctttcactaacattaccaccaaaagtgtccctcattttatcttggtgttctggataatcaggtttctgcacatccataacaaaatgttaactgatacgcggcatctaaatgatgctgtaaaacaaggtgacagaatgccagttgtcaagctggcatccgaaattctcaagttgtgtagggaaatttcacatattggcaggtcgcccataggctgaatcagtgactagggaattttctagaaagctcatagttagtgccacgtatgtataacttactaaaggtgtaactttatctgtggtcaacttaatgttagtgccacgtatgtataacttactaaaggtgtaaggtagtgtggcatgcgttattctacgtttttctcttaatgcactgatacacagctcgcatgcatactctatgtgagggaaaaaatggtaacttaaacacaactaatgtagagaaaatattcagaatgacgaataaatattcacctgatgttttctttgcatagacatggcagagggacccatagcaccattgctaattgttgaacttgcttttgtatctgaatctaggtgatcatctagagctcttctgcatagaggttgattcaaagatatctccccatccaaacacacctcatgactggcttccaagctcggtgcaaaattagttgactttaccaaattggggccgaggttagaggaatcttttttgctaactctgaatagaccccatagaaagtagaacatattccaccctgagacataataagaatacgatgaatcaaactaaaacctagcatgagataatatgacacttcaactagctgaagggttcttactttggaagttctttgacaggatattggaagggaatatgagcaactcaacagtaccaacacttcctctgagaactaaatcattcttcagcatattttcaactaatttactgtagtgattttcatagctgtaaaagatagaagtgttagaatttcaaattgaaaacaacatatgaatgaagcaaataagaatcaggggaaaaactgcaaacaacacacctctgaacatccctagcaaagaaaaaaagacctatgttgtcataagttggaccattttcctgaaattgtgtcggccatgaattctgccgaggaacttcctcaagctggactttagaagggaatttcttaactacatccagcactaactgtgaagcagaacatgataagtgggcttggaaaccatcacacagctccggtgatcttccagtcctctgcagctcaaaaccacctctgttgaaatacaaaagttaaaatacatataataaacacatcgaggaaatatcacaattgctatcaaataatacaggttgagtgataatcaggtctacaaaaatgggatgaaccacaaagcacacaaacatgacaaaactgcgaaagcattatcaataaagtagcttcatagttgatggtagactggcattggaatgtctagtaatttactaagtcatttaaaatgtaaagtaaattaataatttcacatatgcgatggaaaggaaagaatattcatactgccatatccagtccagctcagggacagttgaagccattgattcatcaccagctgaaaaaccttgagcaggttcatccctatgatcatttggcataatgcaaccattattagcagagattcctgctgtggcagatagagatggatgattatctttgaacttcagattgctataatctacgctccccgggatggacaaaatacatcccatatcctgcacattagctcgaggtgataatgagggcttcttcacatggctgaatggggcaggtaaagcatcttttggcccatttatcggattctgataggtaccacattttatgatatgctctaattgattctcttctcttgaaggagctttttcactagatgccaatgtactagtttcagatgtcttgtttcttttggcagatgcatctttcaagttttgctcactcaaaggttttactgaagacaggcgaagtttttcaactccgcaaaactgggcagaatggcccacttcattacatctttggcaacggattgtccgattgctgctagcagcaccctgtctgaagccagtttggtcctttattttagtatccctctgtgaaggatctgaattttgtatcacttttctatgagcaccggaaccaagaatcccacctgaggatctttcagcattagatagcatcatatttcccggcacttttgccaaaggaggcttcttgagctcactgtttcctgaacaaacaaattagagttactcaatcaggaaaatatatgaactgtgtcataaggaaaatgacatgcaaggggaaggggggaaaggaaatttaccaagagaatttttagcaccctgtacatgaacagcgcctatattatttgagtcagccgtgttattttttgtagagaagagctgagctctggtatcagtttttagaacaggagcaaccattgatgctgtggcagagggaggccccaatatcgaagaacactgaccatttgttacattttggctcaccaactgattcatcgcccttggctcctcggcaggtgac

SEQ ID NO: 5001 - DNA, 7669 bp, Sorghum bicolor
actatcactaggttctagtcttaaacttttagtagcacatctaaataatgtattgaaaattgataatcctgaggagtcatgtgctattttcactggattacacctacttcctctgttccaatttatttatcgtgtcacaagtttaactcgatttatagaaaatacatgtaacatttatatctctaaataaatttattaaaaaaattagattcaaatatctttctaatgataccaattatatattataaatattaatattttttaatatatattttgtcaaagttgtttttggagaaactaaacgagagttattttaaaacggaggaagtactttttaacctatcgtatgtcactggattctacaatgtcatgtcactactctaatccctactataccattgcaagatttgggtccggcagagagcagacaaatgaatcacaccacaaatatccattcataactggcgttgtcgtgttcaataagaccgagttgacacatacaataaagaaaatgcagaaactcttggcaccgaagtcgttgtagtatagtggtgagtattcccgcctgtcacgcgggtgacccgggttcgatccccggcaacggcgatattttgtcctttttttttgggtcgccgtctgtaccttctcagccgagcccaggcccaggctctagcgagcaggccataccttagctttcggcccgaatttacaagtccatatactcttccagagcctagctaggcccatttgaccgaccaaaaaaaaaaaagacacgcatccggtggctttggttgatggttggtgctgctttgcttctagacacttccacaacggtcgaggctgctgcgctcgagacccaccgtgtgtccgtatctaaaatggtgcagtttcgcgaacagcaccctatgattgtctcattttacggattggcatcctcctgtatgtatatatagctaattaatccatcaattatgcgggaacatccatgcctcatgtcatgtcctaagcctagctctagctgaacacattttgattcgtcaaatattattactgtatgtgcgtgcgcgcgccaataatgcttcttagatataaattcctactttagagtatagatcaccactgttactataaaaatgtgctagcttcaagcttattaccgttttttacttatgttgtgtgctacaaatgttagaaaattgtgtaaaccacggttttatatgtacttgtctcaatgttaaatcattgggagctagcaatttcaaaacttagtcactaatttataacatataacaaagccatattttcataaactgtattgttgatcaaatctatttgtattatattctaatgcaatggaacttaactctcacacacacataaaaaaaacttatagccaatgttcagagcgattgaccggagggaagagcaagttacatgcttagttttattttcctagtttgacatgtctaaatgaatgttctccacactttttgtaaaccatactagttagctagttatgaaaaccaaatctaatcacagatacgatgacactactcaaactcttttcaaaccaaactgactaagggcctgtttagattctaaatctttacatcccaaaacttttggctgtaaactttatattcaaataggtgtttagatgcttctcaaattttttggtctgcaacacacaagatacgggtccttaagcaagtttacacagttttggggctccagggtcacaaatttcaaatctttacagccaagttttacaagctcctatttagatctattttttcagaaagtgctcatttctccaaaagttttggccgtttggctgcatctagcgcctaagtgctcaccgagtgactgaacgaagtaggcaagtgtacaccagctcttcaccaagtacgcacaatacgaggggtgtatacgcaaatgtgcagcacccctgctaaaccctggcgtgttattatttaacacctcatcccttcccctctatcccgcacgtccgcaaaccccttcacaacacgcagctgcgacccaacccgacccctcccgaggccgccagccttatcctctcctccgcctccgcgatcccctccgtctccaatccatccgcaagcgcagcaaggtgagttcccagcccgagctcccgcggctccttccccgccctctctaattcgaggattctccgcgttctcggcggggtttagctgccgttggtctgaggattggggtgggagtggaactggatgcctgcgcagcttcagttgggtgggtcggtgggtcatgagttttggcgcgaggtggttcgtgtttgtccgtgtagatggtggcgcgtgggtttgggatgtgatgggcggcgtgttgttgtcttctagagctagtttcacccaaatgctggggggcagttgggggcttcgggcctcgtgaatctcgcggggtctgtactcgtgtgacgacgtgctgctgtacttagcttaacatggagttttagaggtctctacggttcatgctcaatggattgactgttggtgtggtggattgggattcacctgtttcatttctctgccactgtatatgtacatgcgctgtatgctttgccacttgggtagcgggaaaaaacgaagattctagcaattgtatgtatgttgggctaccattaaattgttatagaagttgtcaaaattgctggagtgtgtgaatagcacctgaatttgaagttgtggtcatgtgtgtatatgtgtgtgtccttttccataattccatttgcatcagagatagcgaatgtctgcagcagtgtgtaatctgccatgcaatttggttaggtactgatatgtgtgtgttctcatgtttggtcaaaatgtgcttctgttagttcctgcttgcgagatggtcaggttatggattatatgtttacttcaattgttttttatcatgctaatgtaattcctgctgcacaggtagacatggcttcgacattcggtgccacttctacagttggccttatggctgctccagcagggaagaatgtgcgccttcagaggagggctaacttcagagtaaaagcagccaaggagctgtacttcaacaaggatggctcagctatcaagaagctccaggtgagcttcacagctgtctggcactctatttattaatgatatatgatgatgtgctgttgacccttaaccaggcctaattggttctctctatatttcagactggagtcaataagcttgcagacctagttggagttacacttggaccaaagggaaggaatgtcgttttggagagcaagtatggctctcctaagattgttaacgatggtgttacagttgcaagagaggtacagtgcaatgtaatcatggttgtacctagaatttgcttgctagctaataaattacataacactgtctatttttttcattcttgtcatacatgttttgcaggccatgtttttatgactcatttcatgcataaactataaaggatcaacagaagcatatacttgttacatgtatatacaatattgatgatggcaccatttaattttaccataatgtcatagtgactattgcaaaatattgtttttttgttaatggatggagtctattctgaaggtttgtgggttatcatgcaggtactataatcttttttaagttcatgttgaatctaagtaataattgttattctgtaggttgagctggaggaccctgtggaaaacattggagctaaattggtcaggcaagctgcagctaagaccaatgatctagctggagatgggacaaccacctccgtggtccttgctcagggactgattgctgagggtgttaaggtgtgccactatcctaaattttttgctacttgtatatttgaacgatgaattcttgttaagctaaatactctcttgtccaggttgtggcagctggtgctaatcctgttcagattactcgtggtattgagaaaacagcgaaagcactagttgaagaactacgtaagttgtccaaggatgttgaagatagcgagcttgcagatgttgctgcagttagtgctggcaacaactatgaaatcggtaacatgatagcagaggccatgagcaaggttggtcggaagggtgtggttacccttgaagagggaaggagttctgagaactttctctatgttgtggagggaatgcagtttgaccgtggttatatctctccctactttgtaacagacagtgagaaaatgtctgccgagtacgagaactgcaaggtaaacatgggaaatctgagatatcaatttgattttttttgctgtttattgctttcctgtttcagagtattaatgctaccgtctttcatcttcattgttcagcttcttttggttgacaagaagatcaccaatgcaagggatcttatcaacgttttggaagaagccatcagaggtgcatacccaatcctgataattgctgaggatattgagcaggaggctcttgctactcttgttgtcaacaagcttagaggatcattgaagattgctgccatcaaagcccctggttttggagagcgcaagactcagtacttggatgatattgccatccttactggaggttagctaaacttctgttctaaagcatccttatgatcatctatgctccttatttataagcattcttcgtgtctgcagcaactgtaatcagagatgaagttgggctgtcacttgacaaggctgacaaatcagtccttggaacagctgcaaaggttgttcttaccaaagagtcaacaacaattgttggtgacggcagcacccaggaagaagttactaaaagggttgcgcagattaaaaatctgattgaggtctgactttttcatgttctcttgctcactttattttactgctcaggtgaaagtctgaaactctctttttatgaacctaatttgcaggcagcagaacaagaatatgaaaaggaaaagctcaatgagaggatagctaagcttgctggtggtgttgctgtcattcaggtaatgtccagtacacagatcgcaatatgttatttgttcaacactcttttcatcaattcaatgttgtaagtatggtggataactataattcatgtctggtgtggcctgacaggtgggagcacaaacagaaactgaactaaaagagaagaagttgagagttgaggatgccctaaatgcaactaaggtaagttgttggagtaattaaccattttgtgctgccaggtttgtatttgccagatatgatcacaacatctaggtttgttctaagtgcaacttttccaactctgaccccacatgtgtattgatatataatcttgaatgaaaaaattatagattgtaaaagtagttttcacaaaagataaattttgttgtcaatctatacaaaattttagatattatggatcatggttatttttcttagaacagacctagattgacttgtatctgtgattggaggaagtaagaattggtcaatattccttcttgcttcttgcagcattctacattgttctgctgaatttcctttcggttacatatatcactaaaattgtttctttctcttcacaggctgctgttgaggaaggtattgttgttggtggagggtgcactcttttgcggcttgcagctaaagtcgatgccatcaaagatacactggagaatgatgagcagaaggtgaaaacaaaatctgtaatccattaatattcattttgaagaggaggctacagagcgcagccgttataggttcaagtataactgacatgctgaactgccattaggttggagctgaaatagtaagaagggccctgagctacccacttaaattgattgctaaaaacgctggtgtcaatggcagcgttgtcactgagaaggtacagtttgtttaccgaaaatctcacgcatgtaccacagttcatggcatggatctgaatcttatgtaaaatgtttggtgcaccaggtcctttctaacgataacttcaagtatggttacaatgctgctactggacagcacgaggacttgatggctgctggtatcattgaccccaccaaggttcggccctagccctatggcttttctatctgtctgcttgaatactactagtagttagttgatcttgcaagtttagtcatcaatgcttgttccctaccattggtcttcacttcattgccataaccaatctgtcgagttcattacctttttagctcatagcactattctttaatgtaacctaacctcaaatggatctaaaagaacttgggaactgccatgggtaaatcagcagcaatagccggtaaaactgaaaacatcagtccttgcacaatgttggcgctatgattgttacagctctcttccctaccagtctttggtaacttcttttagaggaacaattcctgactggtttgatatttcttttcctggaataaaacctcaaaccgccatgaactgttgctgtgttgcaggtggtgagatgctgcttggagcatgccgcatcggtggccaagaccttcctgacatcagatgttgtggtcgtcgatatcaaggagccggaggccgcgcccctcgctaacccgatggacaactctggtaactgacactgccattgatgctagttctttccacttccgttgcatgttctaaccgttttgctgtgtctgccatgcccaggctatggatactgatgaagtgatgagatgatatggccaagccgcagttgccccatgggacgaaggtgatcaccatattattttttggtaggcgagacgtcgggtccaggtagtttcagataaaaatgtgagtttgttgtacggccaaaaggtgaaaataaggggaggatctgtagccccaaatctgtgatgtaaactgcatcaggacagcagctaaatcaagcagaaattgctgagagattttgtaactgattgcagctatgttgaatgaatgcagtttgcacacgactaaaacacaaatttaaaatgtgcctggcaatacaagtgtttgtgctgcattgaaagttttgaaactgattttgaaactgctatgctggagttgtctcggggagcattacatattttccaagcttttttgatttgatgaacagctccgatctgttatgttcataaaagacagtattagtattgggaaaagtcagtagaagtatatattttgtgaccatcagttacactttttataatatgtcagtaccaatttacaatacatcaccaaagcatgtataaatttgaaatagttgctagccctgcgtcctataatttgaatttgaaacagagatcctcaaaacttgttggcaaacaagaggaatcgagagggcccacacatttgagtgcgttcgaacgtgaacgtcctcttttgtcaatcgggggcttgtggcgcgaggttctccgggccccacttgtcagtgaaaaaatgggggaaagccgtcgtccttgtcgcgcaaggaaaggaggaaccccgcgaaaactcccgccgcgtcttccttccacttccccccgaccccgtcccctgccggctcattcaccccgcgcttctaaaccctagctcgtccgtccctgcttcatcgcgcgcgggtgcaggtacccctcccctccttaacaccctgactcccgtgaatttccgttccatcgagttgtggtctcgcatgcagttgcgattcgaa

SEQ ID NO: 5002 - DNA, 3054 bp, Sorghum bicolor
tttgaaaaataagtggcaataatgattatagatatattaatgcattgcagttcatctatatcggtcagtttatactttgatgctattctttcactgtatgctgcacttgtttgttttattagtgggacttcgattcgtccagtttcattttctgggaatatttccacagtagaaataatccttgcatgtatattattttggcaaatggggtactattcttttagggttttgaatttccctagtgtcttcatttccaaattccaatggaaaatggggttttttttgagaagcacaacagctgatcaacacgttctcaaatgtagtggtcaccaatttgcgtagaactatggatacatttagaaatcatgaactgcatactagattaggcatcctgaatcgctattctaaatgttccctgttatcatagtacttgtacattgtttactgaagaaatttgatgttatttttattcagcggaatggggttgtgatagttgatagtcaggataaaacttacttagatttaaataaccgattttagagatttctccccaccaaataccaatcggtagatctgttgatgcgtcatgcatgagatcatccaatacttgggtaacaggttaggttgctcattacacacactccacttgtttattactttgatttctttttttgataccttgtttgtatcctaagtcagtcagtatgttagtatttagtaacttggtcagtttcccatggctaccaacttttgcccaagctgaagtcagcttttctgtgggcgctgtatagaatatatgattcttgattttctgatgtgttgtttaacatgcatgttggcaggagaaattcaataactatctgtgccgcgaaggcgagaggcttaggcagcaggacagagccgcgatgggccgacgctagagagggagcatcaacttatcaaatgcacaagattcttgcctccctactggaacaagtccctttctaggatggaatccttctactggctttcactttgctgagcaaaacttgctccgatatgtcaataataataaactgactctggttttctgttctttctgcaacctgcgcgctgtactaaaaatcattgagaacaaggggctttggcatcattgagaacaacgggctttgggtggccttttggcccctggtttgtcaagagttcagtacttgtttggcgccaacttgtgcgacatgatgatgtgcaacttgtctcttggtatagttactctgaataaaggttgttgcatttgatgggactccataaatatctgcctccttgcgcaatttgttgggtgttactaccattgaccctttgggttgggttgagggtgcatttccaaatactgcacctactgacgtttaggtgtatctggttctgattatgtatatcatcaccgcggtctaactgcaattgtaatatagcaccgcctgactgacccaggagcgtgttttgctccgtgtgtgtgtgtgtggcagactggcagtgttgcttgctactggtacccgagtgatgtactggaactatcgaataataatccactgcacgcgcagccgcggcaagtttgcgagcccgacacggcgtccctcctggtgcactgcatgcacgggcatcagccgtgttgtctttgtcgtgccgactgccgaactgctgggctggcccaacagcaacagcaacagcaacaaagcggtgggagacgcggccgtcagattgtgccaaaagcctcggcggctgccgatcgatcggcgcccgcccgccggaacgcgcaagttgcattgcatgcgcgaggcagcacactactcaactgaaccgatggagacgcagtataaagcagccacaccatctccttccgctccggcaccaccgcccctcagcagcggctgacgccggctatctatcacgcacagggacgtacgagactgtacgagtggcggaaacgatatatataggtatatatatatatatatatatatatatatatggaggaggcgaggtacgtgaaggtggcgtcccggttcttcctcgccggcggcaaggggaacgccggcggcgatgggtgcggtgaccgccgccacttcctcgacgcatgcttcctgtgcaagcgggacatcacctcggaccgccacatcttcatgtacaagtacgtatctagtggcaagctagctagctactcctacttcttaattaagcgatcaatatgcatgcatggtgcgctcgtcgtcgtctctgcacctgcacgaacggccacgggatcatgcatgcctgctttggtcgattaatccgtgcatcagcttcagctcgtgctcgatcgtgcttcattcgattccgattccgcgtgcgatgcaggggcgacgcggcgttctgcagcgacgactgcaggcaggagcagaggggcatggacgccgcgctcaaggccgccaggcgccgccaccgcctgctgcgccgcaccgcctctttgccggcgtcgtcgtcggccgccgcgtgcaccgccaacaaggccgccactactggcgggaactggaatatcgctgtgggtgagggttttttctgacggctgcgcgctgcccggccgacggccgtccgtccgtcgctgctgcggtgctgcctgcctcgcagtccacgcccggccggccggcttttcccccaactgccatgtgtccggctaccatgcttgcatgggatcgcggcggcgcgtcgtctggtcagctgctgatgtgtacattttttgccatggtttttggttttgtggccagctgctgcgatccgttagagaacgtatgcatggcgcacggtctgtgtacgtacatgttggattgggaacaagacttgtggcatgatgcttcgcagcaagcaatgcaaagtggacaagctagctacactacatctcctgcaaaaagctaggttcacaagagtagataggaataatatataaccacctctttctctgtacgtacatgcacactgcttttcttgtttctcaatgaactgcatcatcatgtctcttccctccatacaaccttggtgggcccaagg

SEQ ID NO: 5003 - DNA, 9536 bp, Sorghum bicolor
tattattcgctgatttattgtgagagaaaaaatattattaaatgactgctagatacggtagataagcttaagcgaataggctgacaaactatcatcatacgtgttatgattgtttggtcatttttcatgtcaagattgtctgtcaatcccaattatgcttgtaccctgtctataatataaacaggtgatcaaggggagaaggaaaaccgtacacactacagaccacactagtccagctccagcctaattatcctaagcagaaaacaatgcaagctagtcaaacccaacaagcatgctgggccccacaggcttcttctacttctacaacaaggaaaaggaagctctgttttcgcctaaaaaaagctctgatagagtgcggagtcatcctcccctccttcccggtgtgcacgtagcaaaatgcaaaaccgcgaacagtgtggtcggccctggaaaaaagaaatggcgacagacttgccaacatacccacacgcatgttttcgtcacgaacacgtaggccccagtttaggcggccccacgcatcagtaggagccgtgtgggcgtctataacgtcgctaaacctggaaaggtccgtccctttcttctcataaataccaaccgggacaccctggagaaggaagcaaaacgggtcacttacactccgggcccacagacaggagatcgatgaagaggtttagcacattggttttttcttagcttattatcaggtttggtttggtgtgcgctgatctaccaaacaaaactgggcaccgtgtaagaaattttttttattgtttttgtcgtttcagtcttatagaaaaattgtgatgaaactaaagatagcttgttacgaaataacagccaattacatttatatatgattgaaaataacagccaattacatttagttttgcctctttttttaataatagaagaaatatacaacttgatcctccaaagagaggagttagaccaccttgttacaaaaaataagacattgcatggccttaccgaataaacgaacagactcgacacacgattatgaaaataaaaggctattacgaaatagaacatgcaagccagagacaattagttttgttatgatcttttagatacatagcttttgctatgtacctagatatacattacgtttaaatacatagaaaaatattatgtatctaaaaaaactagaacgacttacaatttaaaacagatgtacatgaaacttatttggtaaatcaatattatgctaggtgaagaaatactctattagtccaataattttcattaaaactagtgatgggaggaacaacctgacaaatatccatcgcggctgcacaagtatctatactccattttgttgcaatttatagattattttggattttttagatatatgaaacttttattatgtatctagagttgtagacatatatcgtatatctaagtacataactagcatctaaaaatggcggaaccacctataatttggaacagtgggtggcattacttaattttaaaaaggcaaatataaatcttatttatttatcaaaaggaattatggagctactttaacaagccactagtatgctctagctaacaaattttagcctaatgtctagtgatgggctcatcgcctcatggatatcatgagcaagcagcacccaccgacccagcgcgtctggcacgggtcccaccgcttcctcctccccgcatggccccacccaacccctaacgtgtacacccgctgggtgcacgtagccacgggacggaccgcccctctcccggtcaccctgtccccaccgccacccaatcaggcgccgacgcgtgtaaatatccgcctcacgcgcgcgctgccggcgcgatccgacggtcctgatcgaccccgcgggcccgccgagaccggcgacgggcggtcaaaggcgggccgccccaccggctgcgcccggtcacccccgcctcgggcgccgcgaagctatttagcaacccggtggccgcggcgccggcaacggctgccacaccaacacacacacagacagacgggcgcaggaagaggagggggaagaaccgaaggaggaaggagatgagagggaaataatttagcagcggaagcggaagaagcagcagcacgaggtgggggaagcggcagcggggtgagatttttttttgaacccctcttgcttttgtgcacgcgattgattgccggactggttgcgagggggcggagttcgtgcgctcgccggcgtggggaggattcgtggtgggatggccaccggataccgccgtgttgggggattttttagggggtggatgggcgccggttcccgcaatgcagcgcgcctgaattttggggttcgaggcgggaattctgctcctgctcctgctgtcgctggtttggttttgctagccgtttcgatttggtttgggtttggtttgcagcgagtttttgcttagggttcaaattcaattcgtccgaggggagcgaagtttagttctgagggtttctgcctgcccaatctagttgtcgtcttctaccttccccaagctctaccgataaagtccccccaaaatatttcctttttctttttatttctcccccgtagcggttaatttggcctggtaggcggaaggcggtagcaatctacgtctttgcttcctccagcagcgccattagcgttcgcttcgtgccgctgcgtacatgatgtgtttatgttcttgtccccttcggttgctgaaccggatggttggtggaaagccaacccagcaaaagtactccatggtattagttattggggtgattatcttttttttttctacctaagattgttgtttcaaatgttctctatgtgattacgttctttgcttttggggttacttctttcccgtgtgcactcctgcgttatcttctttgcactgcagaatatcttccgcctgggtacatgtagggattgtctgcgtttcccccgagataagatttggcggtacaattacttcactggctgcaatacctctgattgatgtataagcgggtggttaggtaccaccctgctgctgtaatttggggagaatcgatgcctagctggccaacaccgtggtggtttgagcttagttcatggtctgggcagtccacgattgtgctgtcattaggtctatcaagttttatggaatgctgattttacattggaaatttgtagtcttgggctcttggcctctcggggaaggctaaggatctcagctttgtaggccaatttcgctaattagtagtatctgatgaatagaggcacgttacatctgggtcttacatagtagcttcttatatactcttataacagacaactaaatacctggattttgttgcttcaagttggtgcaggctcttttatttatcgcttgcagcttgatccagttttgttcccttaatcatctgttacttgccttgtttgcagttaggaaactgacctggttagtttcgtgttttgctgagatgaacacaatttgtttcgcttatatgaaagcttacagtgcacacattttttttgttagtgcaaaacaaagtgaaaaatatatgatgcataattcctttgcatgtccttaataccgttgacacctgctctctttttacaggttctggctgaagtattttaaggtctttattatcagtgataccagtaatgtgccttgcctcttgtacgtgattgtacaaggcaatgaacggaactcatccctggacctccatgtccgggggtgcatgttctaaccttggatatgccagggacatgaatggtaatgttccaattagcaccacaaattcctctgggccaagtattggagttagctcgttggtgactgacgccaactcgtcactttccggtggtgctcagttacagccaagtactagcatgaatggtgattcattgatgcgtgttcctgcatcaccaatgtcattttcatccaataacatctctggctcttcagtcattgacggttccatcatgcagcaaagtccaccccaagagcaggtgcagaaacggaggtcttcaagtgtaacatcacaacctgtgatcgatgctggaggtgcattgcatgctcagaagaaatcaaggattgatgttagtccgggtgatatcatgcagcaacagctgattcagcagctgatccatggtcagaattctcttcatttccaggggcaacagaacccacagcttcaagctttgattcagcagcataaactggcacaacttcagcaacggcagcagcagcatttgttgcaaccattttctcagatgcaacaaccccaagttggtattcctcggctgcctcaacttaggccaccactggcacaggctggaatgcagttaagtggtcctgttaggactcctatcgagagtgggatttgttctcgcaggatactgcagtatttatttcacaagcgtcatcgtccagaggtgagtttctctatagtgttaattgtttgtgggattatgaggtacaagctcttggcaatacaatttattttgaacgatgttttctagaataaccctataacatactggaggaagcttgttgaagagtactttgcacctcgagcaagagaaagatggtgtgtctcttcttatgacaacagagggaattcttcagctgctgcaccacagaaatctctggtaattaatacttcacacctacttgtattttatttcccaccatatactgctctttatttcatgtctgaacatcactttctgcttgatgttcagtattagattgattagcatcagtgcaaagctctgattgggttactgaaaaccacatttaatttgtcaagtgccttcaatggtagaaaaatagatcttgtatgcacaactttttgcagtaaagagttccattgtagcctgcagcggttaattttttttctatatataaagatgcgatggttacattcatcaattttctattgtctctatggtacaggatacatggcgatgtgacatttgcaatacacatggtgggaaaggatatggttagttgttctctgtcaactctacctgaccaatgataatggttctttcatttgtccaaattcttagtttgctcagttcatagttgtgatctattagtcttaccgtattttctggtaaccttcttgtggctctaaagaatgtcttgccatttcagactagaaaaatataatactaacaatttgttgataagcattaataatgataaaagtatcatgcaaagatcattgccaagttgaaaattaatctctggatcagctgaatgctttttgaaatgtatgaatgtcgcaagcaaagaatattgaaggatctgaagtttgtagctcctagtcagtagtcacaaattaagagtttgagccctctgtttagtctcaaattggaatcgaggttcttcactcaaacacccctattctacctgagctctcccaaacagggcctttgaacaaggtgatgccctagtgattcttgttttctcacagtgaatctctggttaaatcagatatgtttttatgtcttcgtgctatcatttatgcattctgcatgtgctattaagatgacatagatgattgccttagtttctcctttctgagtagatttcttcttaacatctgtaggttattctcatagatcatgatttattttgtgcttttcctattttctgtttcaatgtctgccattaagctcgctaagttaactttatctttttttttttggtctttgttccatttggtagaagctacctatgaagtacttcctagactctgccaaattagatttgaccatggtgttattgatgaatacttgtactttgactcacccaacgaattccggttgccaaatggacaaatggtgctggagcatgcaaaagttgttcaaaaaagtgtttatgaacatctacatgttatacatgagggacatctgagaatcattttcacaccagaactgaaggtatgttgcttagctgtcctggttgcttgcaaatgccattatccattttggtaacatgcccatgttatttagcatttgtaggcactggaatgtttcaaatgggtggcaattgataatcatttctatttcctgattgcctgtgaaatgtgtagataatgtcctgggagttctgttcacggcgccatgaggagtacatcactcgcaagactatagcaccacaggtggagttctttgtccagtgtgctgttcctttgattttcgctacaatttttcaagtctataatttggcaggacagtatggtagtttaatcatctttgcctatatgtgtatatatattgcttggctataggaaacaaatttatatgatgtggcatgagttgttggatcctggattatttgttggggtgaaaaatgcctttcgttttgtgcactcgcatttatttcttatcttctctatgtttttatttgccctacaatattttacagccgcatggacttagtataaggtcaaaatattaaaatttgtacacataatgcatcacatttcttattctaatgcgtattcattgtgggtgctaccccaagtgcatattccttgtacctgagttaactcctcttgtatggtatgccactaactttggtgactgttatatcatatcttctactcacccttctgtttttccaggttaataatctgctgcaagttgcccagaaataccaagctgttgccagtgaaagtggatcagcggggatatcaaacaatgatgcacaaaccatctgcaacatgttagtgatcccatatttcaccttcagtacttgacattgacatccacatgtactgagcaaaattttctggttatctaattgatgtggttacatctttttcttctgtactgttaggtttgtcactgcatcacggcaactggcaaaaaatctagagcatcacaccttaaatgaacatgggctttctaaaagatatgtacgctgcctgcaggtagtttgaatccccccctgtttctttttacagttcaagtacatacatatgcatgcagcatctgatggttgtctgtacttgtcagatatcggaggtggtgaatcacatgaaggacttgattgagttcagccacaagaacaatcttggtcctaaaggtatgatgattgtgcacatttatttaatagtgtctccaattttcatttagttgtgtgaattagttttttctctctaaattattaggttcttccttgctgttttccccacatttttgtataaagatggttggatttagtattaaaattggaatcctgtattcagaggaaattgaatttgtaggtcaagttttgttttataaaaatctacagaaccggaaatccaccattttgaccataatgggctgtacccagacagtttgatgcgataacttggtagacatggttgtttttggcttactcaagcagcaagagtatttttgcaagttatgcagtagagttgaagaataccaatggataacaggtagtaatgtctgtgcacatggtatgtagtgggaagttgagcatctcatctataatttgtgtagcttcatttattttttcagctgatatcagcagagcaataaacaactaaaaagaaacaatatgaacaatgacaaaaactgattgctgttttgatagtattgtgatctttagtatgttagtgcaccttctgtttgccccatttatctacactgcacttctaacattttctctgttcatatgcagagagcctgaacagttattcgaaaaccatggcgaagtttcagaatatgcctgattcaagacagctcatggctgctgctaaccttgccaataaccagagcaacaccaaactaatgggggtcaaacaagagccaagtacttctgtgaacaatcagactcctggtgttggaaccattggcaataacactctacagaatgccacacctctaaacagctaccagaatatgctcagaagctccagtgcaaatccgattttgctgcagcaggaggcatcaagtgtcttcaaaggtcctgcggcaatgcacaatggcatacagctggaagcggccagatccttccgtggacctaaccaagtgcagttccaacaccccacgtcatttcagcagcctatgccgcagcaaaacaatttccagggttttggtgttagcccacaataccagcaacatgtgcttaatcagcttctgcaggaagttaagaataataacaaccgcacaaaagcacagcaaccacctccagatgctcctaatgcgagcggtagtctcgcatcaggagttgctatccccaacgttgctgctactggggagcagggacaacatatcaataatagcaacagtaaccataacagcgcggtgaagggtgctgctccagctggcactggccctagcaatgtgatcaacaatagcacagccagcattgcccctggcagaaacaacagcttcaagtcggtgagcagcagtccagctgctgctgctgctaccactaccgctggcaatgccgtgaactcaaaggtcgatgactccttccttcaactggaggacctcgatgacacaatcactaacgcactggtggaaagcgggctgttcggtgcaggacaagggtggtagtgccttgccgtggtaacatgtgagcatgtcagcacggtatataaacgtctcactactcttgagttcgtttgccgtaagcgccaaacaatgatgtagcctgattggtgctggcaagtgctttgccacccttgtctttctggagcttctgtattgacagtttctcatcatcatatcgtacactgatgtaactccagatgcgtaagatagtgagtgagttggatttggcttgggaatcgggagtggtgcaaccactagctgttagcgtgtgtatgacatgttgctgaatgatatgatgtgattatcgcaaggtcacaaacattacctctgtcatgtatatcattttcatgctacagggagtgccaattataatctcctgttatctagaacaggttgtgtgtttcgcatggttctatgtcaaatgatagaagaaacaaggatcaatcttaactcgtgctcgccagtttggtgtcccaagcctctgggcagcacttcagtagactctggtaaagatgtgttagagattcttacggaaatgttttaggttagagattctcacgaaaaggaatttactactgttgagatcgcttggcagctgggttaatacggactattggaaagggaattacctactattgaaatcgtttagcaactggattattatctagtactattgaaatcgcttggcaactggatttactttcttattagaagagtaaaataaaaagtgtagagaaaagaattggtgtgaaaccacgatttaggaattgattctctgcgattcagcgccctgggcgtttggcaccatttccagtgattccactaataaattcttatctaaaaaaacaagaaaggttctatgcaatcatacgcccctaaataaatataaaaaaatggctatgttttgtgagaaaacagttttcataattcatcgcacaacaa

SEQ ID NO: 5004 - DNA, 9210 bp, Sorghum bicolor
agccatgcatagaaggacccttgttggccccaaactttgccttggcctcattgagcagcttccttcaaggcgagactacctctcctcttgagccacctcctaaacttgctcgcccccctcaagctcaagtgacatgtgcaactcatatgaaaacaattgtttatgtaatatttaaacttcgtatttcaaaacactataatctccaaatttgaaatattgtatgttcaacttgtcttatcttcctgcgctcatcactgaaaacataatagagttgggaaaatgtgcgatgtattatttagtgaccattagcatggacatataggcatgatggggaaccaaggatgagaggctcacaagccgaggcacgtttacaatctaacactccctcatagatggaactaggagcaccgtgaacactaaaattggctctgaattccacaaagacggattgataggatctagatggctagagggggtaaatagcctctaaaaattatcctacaaactcacaaaatattagggcaaatgttgattagtatataagatgctaatgcaactacttgctctagctctatttcaccacaagcaagcctctaatcaattctagttgatatgtcttaggttgtatcacacaagtgcataaactagcaactacacaacagaactagagagctaactacaactagttataactacaagctactttggagctactctgcaagttacacaagaaactaggaaaacaactatcacactaacaagaatactatggatgtaaatacaagcgtgatagtgagtaaaccaaattgggcaagagagagatgaacacaatgatatatctcgaggttcggttgcttaccgtcaacctatgtcctcattatggcgagtccaaactaggtggttcgcgcgctaattggcatcacacgctaagccaccacatgggtgccacaagaaccacacatgtggggtgtataaatatatgtccaattcatgcattgactctctcttgcccatttcttcggcggaggcattcatttggagttcaacggagtgcaagagcctagtggggtgattgatatttgttaaggacctcactcattaggcttgtcatggttaagtgagagtatatgcttattgctcttggtgatcgtcgttgcctagacggctcggtggtgatcattcgacagagattgtggatgatccaactcatcttgtgagtggttgtggggcaattcactgcgtcgaagagacaaagaatcagctcatagagagcacttggtccttgcgcaaatcgaagaggagctacaccaccatttgcgcgagtgctccaacgaggactagtgaggagtgacgactctctgatatctcagaaaatcactgtcgtgttcctaaccttctctttactttgagcaatttcaactatgtttttacatttctagaattgctatgatagaatagggttagaatatagggagtgtttgggactgctccaccgactccacattggagcagatccacaaaacctaggtttgtggagcacctcttcacgtgttctcacaactctactttttttttctcaaacagagtacgtggagctaaaaccgtttgactaaaaaatatagagtggagttgaaaaacatggagtggagtagtcccaagcactcttttagaatgcaaaacattgtacaatagaatagaaaaacactagtagcactataggtgaaaatggactaagcagtagattttaattatttcgagaaattttagattagctcaattcacttttcttttaagcaatagatggaaaagaatgggctagacgaaaaacagcctagacgatttttttaaaattttttgtctgtttattattaaggatagatagagtaggcgtgattggataggcctaattttaatcaggcccatctgtcagcccaagggcttgatcgtaatcaggcccctcgattttttccttctgcagctccctccacctcactcgtgcaattcgtcgaactcgaacactgccatggcagccgccgctgccgacgacgacgccaagctcgaatccttcctccaatggttccaggtccctccctctccctttcccatatctcgtccaacccttgcttccacgtaaaaccataaaccccgacccctccctttcctccgcaggccaacggcgccgacctccgcggctgcacgatccgcgcatgcggcggcaagggcttgggcgtcttctccaccgccgccccggagccaggcgccaacgacggtaacgctcccctcccctcccctccctcccccgaacggacgaggctcatccgggagttacgccggtgcggtgcaggggtggcgatggtggtgccgctcgatctcgccatcacgccgatgcgggtgctgcaggacccactcattggcccgcggtgccacgcgctcttcgaggagggacgcgtcgacgaccgcctcctcgtcatgctcttcctcatggccgagcgccgacgccctggctcactctggaagccgtaagactgcgatccgctactgaatccccctgcccccgcacatggaagtagtttgaaccgtagctgaagtggtgtgtcactgcaatcgcagatatttggatatgcttccgagcaccttcgggagctccctttggtttactgaggaagagcttgccgaactggaagggacgacgctgcatcgggctacggtgatccaggttcatctgggcacactgttgttgttagacttctgtgctggggatattgggtggtaaagacaatcaatctgttttgcgattttgtttcagaggaagtcattgcaatcctcatttgatgagaaggttaaaggactcgttgaggagcttttacatgtcgatgaatcagaaaggtttggatttagttttcaccattttgttcttatatttatttagcaagcatgctgcatgcttaattgtcgtttataaatcatagaatcttaatttctgtggggcctcaatgcaagggcctggcttgccactggggtcagccggacccatacaatcttgagaatttcaatggaaaaatactgtgtatagtgctaatagtttctagtgattacatccattctcagactaagaccccagtgattgtttgtcttggattcacccccaatgcacagcattacacctgatggtattttacagacatgatgatttccacaaggatgctgcatgactagtgtttctcgagaggcattgcccacttttgtgtgatggcaagagtcttgtcatcttgtgttcatctaggatgttttcagttgattcatggtagaaatcttactgtcatgatattcacagcgtggtggcatttatgtaaactgtatataccttatttatgaggtatggatttagtttataaggtgtttgaaattcacttctagtgttgtttatggttacccattttggtttattgacttttagagtctattttggtctgaatagcctttttcagctagcccttactacacttgcagatcttatgttattgatctaattggatctctcatgattttatatttgtttcaaaatgtacttaagacccatcagttcacaaatttaacaacacccaaataatgacatacctatgtatgctctcatggcctcatgttgaaatttgaatttcactctgattctgttgtaataatgctggtgattcttctaactcttttatgctgcatcacttcttatgcgcaaatactggcctgtttttgtgcaaccaaggaactgacgctagggcctaatctcattctgcttagcatcaaattatcagttaggcgtttctaaaatattgtcagttattcagctttttaggtgcatgggtatctattcattaggtgcccggtcgttatctttgtctcattgattgagttgttaggagcctcaaaattgacagaatgttgcatcatgcttaagcacataaatattaacttcattccatatcacttctcttctgccatctcctcaagtaagccagtgccatctggctctgttttcttgaaaggttcattgttattgcctgatacataaagtattatgtttattaagcaaaaaaaaaaaaatctatctctattgtactccctctcaagtaaattggtgcctcctggcctttctctccgaaactaagattcattacaaatgcttgtagcatgtttgctgagaaatgtactccttttgatccgcttgaaattttccattcgttaaatgctaatactatcaaaactgttttgcagctcaattgaagtgctgtttgaggacttcctttggtatgtaataactcttgtttgtactaaagttagaaacgagtcaaacgacatactgtaaacttcacttgatatcattttaccatcttgattgatcatgtcattatgtggactgtggacaatgctttattagtgtaatgttgtaaaaagtacatgggattggagaatcaagagaagaagacaatcctgaaatgttgtaatcaagaagaaacagaagaatcttttgtggttattttttgtttatgacagtgtagattagttaggtatcatctgttacaatagtataacaattaggagttcattttcaccatgattagtagtgttgcatagctatactattgtacctgcaaatctaccatgcaattggatgctcattgttcagtatagccacgtgcataaatgagttagccacatgaaaaagccatagctgaaccaaataaggcatggcaaggtattactgtattagtcattcaaaaaaagttaacatgtttcaatatctagcatcaagtacctgcttccttttcctgtggtcaggatgaaaatttgatcggcattaaggaatctgcaattcgtacttgattaaagtgatggtgtcaaggactagttctttccacaagtgtacataatcaaaagcttaatgaaactcccatatagacatcccagttttattatctccagctatttttctttctaatcaacagtatgagtctttgacagggcaaactcaatcttctggactcgagcactgaacataccactgcctcattcttatgtttttccggggtcctgtggcgatgaacaaatcagaaccggcaatgatgcttgctattctagcccccctgcccaacaggtcaatttcaacctagctctggtatcataattgaaactgaattcaacattgtgtcatggtcacaaatcttacaatttggaacgtagggagtaggtaaatgtactatccccaccatcaaatgagcctcaggattgttgcagagttttaaaagttgaaactgaattcaacattgtgtcatggtcacaaatcttgagtctcgaaccatttctgactttggaggattggtatcataattgtacctgtatgctcgagtgggtgtccttttcctaacatagaaatagttaaagaaacttaatgaggctctggtataccatgggcatcatttctactcgtgctttctggcatcttcactattacttttaaatggttttcttcatccttatgttcttgtgccaaaatacttgctcttttttttggcaggaaattgatgttacggctaaggatcatagtgctgacgacaattctaaatcaagtaacacagagtcaatttgggttgagggccttgtcccaggaattgatttctgcaatcatagtaagggttctatatttaattcatcaactctgacaaagtattgcctgttttttgacaataaagtaaacatgtatgatgtatctttagtctagcatcactctttccctaatccctgttataagctagtttgattgtattcactagatgtaaaggcactggcaacatgggaagttgattctgtgggaaatgctactggaattcctgcttcaatgtacctcttgcttggtaactttatgatccaaccttctttttgtatagttcaccacatgataaatgaactttgtggctttcctttaagctaatattttcagtaaaataattattcccattatgattaactgtatgtatttgtttctttctgaagctgataaaagttctgctgaggctggagcagagatctgcataaactatggcaacaaaggaaatgaggtattactcaaaaaaaatgtgtagatctagcgttattagtttaccactaatgttttgttcttttttattttagctttctgtttttttattatagttgccgttgtatgacttggatcactctctttgtctcacatattcttttttagaatctctatcacactttttgtaatatactaatacggcaccatgatacttgtgtaattgcctcttgtggaacaatagaaaccattacaggaaattcctttagatctgtattcttaggccttagttacaattttggcaaagaaatccagaaaacaatctaatgtttcttgacgatgcataatctaaaagcaaacaaaatcaaatgagggggatgcactgcttgaagcttatgtggcctttttttatccctggggtctggttatttcatttgagtggcacatggattcatatatccttagttgcttatggatttacttctagtgcaaatgctgaattattgctctagatttcacactgatcatacttagaggtgaaaagatggttttgttccatgtttaatagtttaacaactagaatagccatactgatgaagttttgtactttgtgtacttacaggaactattgtacctatatggatttgtggttgacaacaatcctgatgattatctcatggtaaccctcataatgatgtatgtgctaaaagataataatttagaatttttccatttatcttttgtagccaataaataaagaaaggtcagaatttggactattaaactgaccaagcatatgtttggcttaaaaaattgtgatactaatcagtttaccatcctgtgatatttggaaacctaactctattgctgtcaaaagttgaaagaaaaggatgaagtcaagttattattcactactaattcctttctcatttattgctgagtcaatagagctaggatttgaaatttcatagaatagcatgtctgtgtctcgtcctttgtataagttactaagaaaccgtacaattattcaattggctgtttgaaaagcttcacgtgtttacaggattaaattgttaagattcagtattttcccctcttttggcatacttacgtaagatgtatctaataaagcaagctcgggttacttgctaagtgcaggttcattatcctttggaagctcttagacagatccagtctgctgatacaaaaatgcagctactagagatgcaggtactgccaagggattagcccttttcgatcatattcatgcattgcttctgtcattatattaaggtgccctgtacatgccagggttttgggaattgcctactagtaacaagtaccttttgcttattagtaccttatatatcgcttttgactgttaatttgtacaaagatttcaagatttgtccctgctcaggacagcccaagattatgatgactgcacccagatcaagctctctaagccttcattacctccatgaatctcactttgtgtgtcttctgtattttacagaagggcgaattgagatgcctcctacccagaagattgcttgataatggattttttggtatccattccagtgaagataaggatagcaagaaaaatactagtccattttcaagttttagttggagtggtcaacgcaaagttccatcatatcttcacaaaaatgttttccctcaggaatttatgagtaccctacggacgattgccatgcaagaacatgagcttgaacaagttgcttctttacttggagaggttagcactttttacggtgtattttaagccaagagttgactcctaaggctatataatctcatgatttagattcagattttattcttaaggtgtcatactacattttctggagatgcagtaatcagcgattacgtctgaattgatctgttgataactgtatactgaaagggagtaggagactagtgactgtgcacgtaagaatcttttcttagccatttatcgtgccaaaatggcagaattccatgtagcgtgatttaggcatgctttgttagctgacatcctcatcctatgacaaaacttggagtccttaggtttcaaaaaatcttaaaactaactagcatgggtgctttcacactcttgtaatgtgtgcagctacataatttgctgcatgtgcccctgtttttgtggcagcgccagatgatagttatttcatgtcgtttgcatggaggcactagtttttggcatcacatccatgatccatgtcatgaaggctgcattcatgaataggagctttactggctatgcataccgtcaaaaagtattcatgaagcaattgagcattcagatgaagattagcttttgttttcagcatcattctatatggcctatttaactgatgactacacttatatttgaggtgctcaaagaatttatttggatgtaatacatctaaacttgaaatacaacagattctgtattatgctgcaaattgattctagggcctttgccgaatttgttcttgctaggttggatctagtgaagatagagaaacatctgatgcagagatccaaagtgctatttgggaggtctgtggtgatcagggtgcactgggtttgcttgtggatcttcttggggtcaagtaatcacttttatcttcctattgatgtattttcgatcatatatctgtctttggtatagcatcaagaataatccatagatcatcaccccattcattttgcaagaatggctgaacttgacgagggctctggaacagaagcatctgacaccgaactgcttgagcagtttgattccattcagtcagaagactgcgcgaggtgagcagatcattttttggcttttctcagagtttttttagttttatttctcttatcttaaattcacatccatgcatggtactatacttatttcctgcaatgtactatggggtcactattgaaaattactattttaggataaaacaagaatagccccaatattcaagatgtgcatggagctaacagattttagagcatgtctttgttcatcaacctcatgttttactgtaacgatatgcaaaccattttctttatgctcagtgaaagtgacgagaagcacaaaaggaagtcaaaaataaattaccgtt

SEQ ID NO: 5005 - DNA, 6091 bp, Sorghum bicolor
agcgagtcgaagcctcgtctaggttgctgaggtaggaaggcgcggctttcctgccaccagtccaccagccttgaaacgcccgacggaagtagttggtcgaggccgatggcggataagaggcgatgccagacctccctcgcgaatacacatgccaccagcaagtggtcggtggtctccggctgctgatcgcacagcgcgcagtctatacctcatttataatgtaatagaataaaatgtattgttttttattgggtcgtaggactagagtctttatttatggaattgggataaaagaagtccacttggacattaggaccttcacaggaaatccagagccccaaagccttcaaggattgcattgcatttgcatagctcaggccttgtttatttagttcactaaaaactcaaaacttttcgagatttctcgtcacatcgaatcttgcggcacatgcatagagtattaaatatagataaaaataaaaactaattacacagtttgtctataaatcgcgagaccaatcttttaagcttagttactctatgattggacaatgtttatcaaataaaaacaaaagtgctacagtatcgttttaacaaaaaattttggaactaaacaaagcctcccatgttcatgtgtgtgggtgctatctgtgtgcacgagggggtcagagcatctccaagagaaggctaataatattcccaaaactaaaacttgcgtgcttaggagaaaacctatgggtccaacagctcctcaaaccttctcccaaaatttgctggctctggaaaattgagcctgcgcccctcatatgttcagaccgacggtgtgcccccaatcttcttcggtgcttcttttcccgtgctcgcgccccgttctggtagaaaatttccgtgctccttctcccgttcataagaaaaggtgagactcgaggagctacgaaggatggaacagttggccaacggaacaagtcaagccgatgcaaaagtcccaatccaactaattctgtttctagccccatcctcatccaactaactgacgttgtggcaagttcaaaatatttttgggtgtaaaatattggggagctgctgtggaggaaactagcttttagaaaataattatttaagagagctcttaatacaaagttttgggggttatatttttggggaactcttggagttgctctcacatggtggctttggctaaaggtaggttgcagctgctttgacagtagccgttgatggtcagtccatgggttatccgcttttatatgtgtgtcgaataaggatagagatgactctctaaatatctttatttagttacattaaagaagaaccacggtatatttagtttatttagttatactagagaagaaccgcgggatccatttaaagcaccatccccactgtcctcggactccagggtgtgtttttacagcttttctttttaattgagcggtagagctcatacgtattcgatgtagagtgcagtgctcccaggaaaaacacgagtgaaaaacaaaggcaacacccatgacgaagatggctatcaaataactgtacgtcgttgacaatggttctatcaagtttaatttgttgccacccattgctgcccaaccgaaagactagctaattaactgcactatcagagcactcacaatgcagactctattatagagtctgcattgtgagtgccctaagcttgtaactccctgtcaatacttcaagaccaagcagttacatgcatttgagaacttggttgctattgacacagtctcaaggcaaaagtagtctaccattgagccacagaacttaagaattttgcaaatgatttgtcatgccatcacatcagtattatttatatatgaacacgactcgcctgttgaataaataaataaataaataaataaataaatcttgatgtccatggtcaatggccaaaccaaacaaatggtaataatattgctttgaggaagcagcaggccagcagccagcagctagctccaatggcttctcattcccagctctcctccaacgccgcaaccgctggcctgtgcttgctttcagctctcgccatggccttgctggcggtgaccatctacatcataggtgttcttgtgtccttcgccgtcttctgcatcaaagagtttgcttggagtcggagagctcatgatcgaccaccgctcgtcgggactatgttccggatgctcaagaatttcgacaggctcttcgatgagcaggtggagtacgcgcttgcccatcgaaccagcaggctgctctttcctaatcctgggcacagtgagctctggacctctgatccacaagtaattgagcatatcctcaagaccagcttcagtaaatacagtaaggtcggtctccttgcctgagatcatcttccttctcccttcactgctactgtattgttcaattccatatacagtaaggtagttttcatgacagaatcagtaagcaaagcataaactggatattactagtgttgcgttttcacgttcaagtttgccagatcacttgtatttgttaaccttgaaaaataacaaaggggccaactgaatacctcgggagaacttgagcttgtgcacacttgtgacactgacagttttcaaaacaaatgcacagggcgacttcaacactcaaatcatgaacgatctctttggaaatggaattttcgcaaccgatggggagaagtggcggcaccagaggaagttagcgagccatgagctctcaaccagagtgcttcgtgacttcagcagtggtgtgttcagaacaaatgcggcaaaactaacagaggtggtctcatctgcagcaaccaatagaacttccatagacatgcaggtacttctatctctaagtattattgtaaaaatgtaaaattacaaacaatagtataacttgtagctgcagcctattctgtgtttcaattacctaatttacctaaaaggcaaagaagagccaaatctacatctaatctaaatttagcctagctagctgttggttgcaggaagatggagcaaacatgtaagcactactcaactgagatatcgatgggttttctaaacaactaaacaaacataacgatcaattttaaacagagttcattgtttgaggaagtaagcttgttcccgagtaccttgaacttgaacaagctaaactacatgctactaaaaagaactcaagtacaaagctcagatactaaactgttagttatccttattactacccattcgattgcaagttctccttattttacccctctgattgcaaatcgagttacgataatccaactttcctcaggatcttttgatgaaaacaactatggattcaatcttcaaagtgggattcggttttgagctgaacacactatctggttcagatgaacctagcatccaattcagcaaggccttcgacgatgcaaactttcttgttttccatcgatatgttgatatattctggaaactgaaaaggtttcttagtattgggtcagaagctaagctaaagaggaacattgagatcattgacaactttgtaattcagttgatccatcaaaagagagagcaaatgaagaatggacgtgatcatgtaagggcttagaatctcaatccatatttttttttgcttagcaaggtataaacattgagttttacctctaagttcaattttatcgatctcctctttgacacatgcagaaggcaagagaggatatactaacaagattcatattagcaagtgaagaggaccctgaaatgatgaatgaccgttacctgcgtgacatagtcctcaacttcctaatcgccgggaaagacaccacagcaaataccctgacctggttcttctacatgctatgcaagaatcccgtggtgcaggataaagttgcccttgaaattaatgagtcacttgagtgggccaaggaagataacagcactgaaaacttcactgcaagattgaatgaaagtactattgaaaacatgcattatctccatggtgcgatcaccgagacactacgtctgtatcctgccgttgcagtggtatgaatagcttcaatggatattcctgtgcagaaaagaccccattaattaatttttggatctggcaatgagcacctaatacaataacttaattatgaaaatggcttaatgtgtaggcgtatttcgcatactcgctatatggtaacatgataaattaataatcagacctgtggatcttactcaacaaaaagtttggttattcttttctttcaagaaaaaaaataagcttggttattctgaaaatttgattggaatagtaagggttcttgggaggaattgcaaaagctactgacgtaaggaaatatcagaaattcagagctcaacctaatggaaagagggaatttgcattcactatcacactttcaagattcttgaatcaaattaataatacaatgacgagaatggcattgcgatacatggtaatatttgtctgtggcatgcatccacattcaggatggtaagatggcagatgaagatgataccctgcctaatggctatagagtggttaaaggagatggagtgaactacatgatttatgccatgggaaggatgacatacctctggggcaaggatgctgaagaattcaaacctgaaaggtggcttgtgaatggagttttccagcaagagagcccttacaagtttgcagcttttaatgtaagtatcttcccacgggtttaaaggtcctatagtttttttatacagtataaacatgtcctgctctagttaggtcgaagcacagccttgcagcactgagaattagaaacaacaataagaaaacagcaacaactggtattcaggtgtttccttgtgctgcttgagtagaattgaataactagtgcacaacattgcaatgctactgaagtagatgacatgctaccccactgtcagaagtgacgaatgacacatcaattattcaaattacagaacgagtagggaatttgttatcaagttattgaacgattcaattacacaaccaacagtacaaaaacatggaatttgttatcaagttactaagacaagacaaatacaatttcattgggttttggaccaccattatttgaatttaacaaagcttcttccttccaagatcaggcggggccccgcatctgcttggggaaggaatttgcatacaggcagatgaagatcatggctgctaccctgttacatttcttcaggttcaaactagaagatgaatccaaggaaccgacatacaaagtcatgtttaccctccacatcgacgaaagtcttcacttgtatgcatacccatgttcagcatagactgccaaacaagatatcctttgccgatgtacatattccacaaattatagtgttttgccagcctctttaggcaagtcactgcgagtacatacaagagcaatgaagcaacatgagcatgggacaattttaggtaaaattaaattcttcttttcacgatcggggaatatagcccgtttttcattgagagtagtgaattacacgacgcatctacgagagatgtaacatccccgatgttacggttactaaaagtggatcatgtcatcatgagtattgcatagtatatttgttaagtacaccctaatgcattaacttaaaataagtttaatttggatgaatgtgcttaggaattaaagtgtgcttatattgtgtttggatgcttgtgttggtgattaaaacccttgggtgaaagttttccgagagcttaaggggggaagaaccctaattttaaaaccctggatttgcccccttttgtgcaattcaaaaaccaagccaaatttgaagttgagttcaaaagaaaagttgtagatcttgtcaagatgtacaactttggtgttttgagtttttgaagtttcagtacaaaattcaaagtaattttgaaaatacagatttccagaaattgtccccttttccaatttgaatctccaattcaaaatctatttggaatcttgaaaagtggccaacataaaagttgtagatctcaaaaagttaaacaactttcatgttgggaatttttcaagttgttttggaaaatcaaaagtaattttggaaattctaat

SEQ ID NO: 5006 - DNA, 5926 bp, Sorghum bicolor
gtggagcccagcttaagggcgatggaatggcggcctcatacgttcctgaatcctgatgcccttatcccttcgcttacaacaaggaccacatatgcatccgtctcctccctttttccatgttgtatctctctttttttccttttccattcgagtatacggagtacgagtacgtagaaagtacgagcgacagagatactgtgggtcctgagaggggcatctccggcgtgcgcagcggcggcggcgcggcgcacgagtggccatggagctgacccgcccggcacagcggaagatcagtggcggcggagcagctgtgcacacaatgagcgtccagcggccaaggtaggtccagttcctcgacactatttagcgatgtgcgtctgctggtaaaacggctccgaccctgtcccaactcaatcaaacaaaaaaaagagagccgatggagctgcagttggatgcttcacacggctccactacagtagctctacagccacgttaaagctcaccaaacatgccttttgttggagccggagcagaagctgcttagagcagtctctactgactactcggctcaatcaaaagttacttgccatatagataaataaagtagttgaagttgtcttctttgcattgcctacaataactctacaatagtgttacagtcatgcagccgcaaccatgcagagcgcacgaatggacctcttagttggagagtctgaatagaagcatgcaaacaactaatgttagtggtcttaatcaaaagttagctgccatatagataaaaagtagttgaagctgtcatcttacgtagaagactagccactttatctgttgctaatatcaccatttctctccctctctctctatatatacataaatccgcttgctcgtctacctttgctctcttacaattagtctcaacttttcttctaaaagaagtggcttgcaccttttgtcagttgaaacattgacaccctccgtaagatgttccaacatactaatatagagccactatttgagatgatacggattatttatgtagagctcgaggctagaactataagtcacaatggcacattgaaggaggcttttagggcagccccaacaagggcatacctaaacatgcatgatatgaggatattagactccatctttttggacaacactaccctttttctctagaacatacatgtggctttgaactcctctctctatattaaatcgtgtgcttttgtggtgtgtcagatcaagctactgatacctctgtggttgctcctgcgacgccgctactgtacatgacatggaggcctagtgcttacatggatgtcatggtggtgcgagaaacacaaaaattctatcaaacaagtccttaaaagtgaatactgtccttaacggaaatgcatcatcgaaattgtcttcctatcacattttggcctctaaaagtagatttaggtcgtcaagaggttgattggagtgcacttagaatataaaattcaagccgaagctctaccaacccttagcagcccaatggcggcttcaaaccagtatagtgcactattgtcaaaaaaaaaaaaccagtagtacacacccctggtccatggaccatgtctaccgtcagttccgtagccgcctcagctcagctactaccgtcttcttgttggcaatgcgtcccccagaacgcaccccggagtctatacataaccccctcccatctctgatctccccgaccgcaggctcgccatctccgcctctcctcctccacccggcacgcgcacgcacacagcgccatcacagacaccatggctacgcactcggtcgccgccgcgcacgccaccatcgccgcgcgcgcggcgccggctgccggggcgtcggccccggccgagcgccttggcttccgcctcagctcgctcgccggccgcggcctgcgttccccgctcccggcccgccgcgcgccgtccgcggccgcgtcccgccgccagcgcgtcgtgcgcgccgccgccgtcgagacgctcgaggggaaggccgccacgggcgagctgctcgagaagtcggtcaacacgatccggttcctggccatcgacgccgtcgagaaggccaactccggtcacccgggcctccccatgggctgcgcgcccatgggccacatcctctacgacgaggtcatgcgctacaaccccaagaacccctactggttcaaccgtgaccgcttcgttctctccgccggccacggctgcatgctccagtacgccctgctccacctcgccggatacgacagtgttaaggtaaaccagctgattcacttgcttttgctgtgtttgtttccatcttctatttgttgtgcgtgggattttgcccccggttggttggttggttggagcggcgaaatcgggggtaggttcatgtgtaaagtttggatcttgtttggtaaaatagtggaaagctttggatcttgactgctatctttggtggcggcatagaaaaggccgtgcctgcctatgtccagttgtcaaagatgtattattatgataaggggaagctaagttacctaggaagattagttggagactcagacgttacaccatggacctgtcatcactcatgctttagttgagcagaactattgagtgtaattcacctcagcagagctgctaggtatttgataggcatctcttatgtggctgaatttcttttaactatggttggtacactgctgctgcaggaggaggatttgaagcagttcaggcaatggggaagcaagacaccgggccaccctgagaactttgagactccaggagttgaagttaccactggtctgttttcttctttatcggactgacacttgttgtgcattgccctgttgtactgtttgtgtaaaactaaaagtttcggtttccaatatggttgttctgcaggaccccttggtcagggtatcgccaatgctgttgggttggcgcttgctgagaagcacctggctgctcgcttcaacaagcctgacagtgagattgtcgaccactacacgtaatacttctaataatctgaacatgcagtgtcttgcttttagtttgtgtggtgcagctccggtaacatgtttcgtgtattctttacaggtatgttattttgggagatggttgccaaatggagggtattgccaatgaagcttgctccttggctggacactggggtcttggcaagctgattgctttctacgatgacaaccacatttccatcgatggagatacagagattgcattcacagaggacgtgagcacccgctttgaggctcttgggtggcacacgatctgggttaagaatgggaacaacggctatgatgacatccgtgcagccattaaggaggcgaaggcagttactgacaagcccaccttaatcaaggttggtttctttggtatttgcaaccttttatgttttgttttctgtagattttatagcactggtctaatttgtactctatttaggtgactaccacaatcggttttggatcgcccaacaaggccaactcatacagtgtgcatggaagtgcattgggtgccaaagaggttgaagcaaccaggcagaaccttggatggccctatgagccgttctttgttccagaggacgtcaagaggttggtcttctctctgttcttgtaatctagttatctggatgagttagtggaatgcataacactcacacggtttctttgatggatcattgcagccactggagccgccacacacctgaaggtgctgcacttgaggctgattggaatgctaagtttgcagagtacgagaagaagtatgcagacgatgcagcaaccttgaaaagtatcatcacaggagagttccctactggctgggctgatgcgcttcctgtaagaatacatatctacttgcaatactgcagttgatactgatacatggagaattaaactctaatggtagattcttgcttttttctctctctatagaaatacactccagagagcccaggagatgccaccaggaacctctcccagcagtgcttgaatgcacttgctaatgttgtgcctggtcttattggaggtagtgctgatcttgcgtcctccaacatgactctgcttaagatgtttggtgacttccagaaggatacggctgaagagcgcaatgtccggtttggagtcagagaacacggaatgggcgccatttgcaatggcattgctctgcacagtccagggtttgttccatactgtgctacattctttgtcttcactgattacatgagaggtgccatgaggatctcagctctgtctgaggctggagttatctatgttatgacccacgactctattggtcttggagaagatggtccgacccatcagcccattgagcacttggtgagtttccgtgcaatgccgaacatattgatgctccgccctgctgatggcaatgagaccgccggagcatacaaagttgcagttctcaacaggaagaggccatctattctcgctctttccaggcaaaagcttcctcacctgcctggtacctcaattgagggagtcgagaagggtggatataccatctctgacaactcaactggcaacaagcctgacctcattgtgttgggtactggctctgaactggagattgcggaaaaggctgccgatgagttgaggaaggaggggaagacagtccgtgtcgtctcatttgtttcttgggaacttttcgatgaacagtcagatgaatacaaggagagtgtcctgcctgcagccgtcaccgcaagaatcagcattgaggccgggtctactctcggctggcagaagtatgtcggagcccagggcaaggccattggcatcgacaaattcggtgcgagtgctcctgccggaacgatctacaaggagtatggcatcactgtggagagcgtcattgcggcggccaagagcttttaagagttaacaacaacagtcttgagttttttgtcatcattgatgccaaaggaacactgtacctcgaggtcttgtgccccaaagcttggaataaacaatggagggagcggaaggatgcctgcatttggagcgcgtgagtggtattttaggcctgtaataaacaatgccttttccatttatgttggttttattcggtgaccctcacacgaacacgattcatgaaggtgagcctggttattaattaaatcgggtgctggtttttggtaacatgcattggcaatgaccttactgtcttgcagagcgatgcttcattctttgctggatcgtgggtttaagtcgcactgtgtcttagttgttgcattttttttgctcttttattgatacagttttctactggcttttatggtacataacatttatatattgagctcaataatgtgatgtattttcttctggtttctctcgaaatcaaaccaaacttggtttgcaattgcaacaaactttgttcagttcaaatgcctgccttgatgtggtgaacttgccgcatcagctgctgtcgtgacgtgcaacggtgcaacagcatctgaatctgaatgtaataccgctgtcatgaagaaacaggtgaagaaaataccaatgctgtcagcatggctagctttctctgttgttgttaccaggactattcagcctgaatgtaaacgccgaccaccgacggctgaatgtaaggctatttttgtctgttggccgtatccaatccaattcagttcatacgtatcagatacacgtatccagcttgatacgtatcaaaaatcatagtacagctaggatacgtatccgatacatgatatcgatacatcatcataggtgaatgttgcttggatgtgggttcacatgagacatgtgaacatcaggaattcaggacaggacacacgaagctgtctggatccactggcagttctgtgtggcctggacgttcttgcatgctgagtggaggggagtgtggctaaggtg

SEQ ID NO: 5007 - DNA, 4933 bp, Sorghum bicolor
tgacagtacggatggctgactggggttgaacatggaacctcttgaattattgtgtaaagtgtgatttgggagaatatatgtatatcagaataggttttgtgaatgactaaagatcatgcacgtatgtggagaatcgattctcaaaaggctatatatatttaataaccccaataataccatcaatctgttgttatgtccatctgcccctagcatataactaaacatctagccaactttagtactatcttttaggggcagcttagcatctagaatggacaagcaacacaaatcgtcgattatattagtcaaagggcaaaaaaattactgacgaaaaaaagaagcttcacctgtcttcctttttttttgtcttccaagtaataaccttactatcaaactgttaatttgatatcaattcaccaaatcttgtcgatagttttcaataacttactcatacttagctactttgactccattagtgaacaatttattttattcagttcttccacactacaaggcaaaggttgggaaatattccataatcaaagcagattgcatgacttaacaaaacgaaaaatgatagtttaacaatgtaattttactatccagaaatttaactggatgattttatgttgtctttcagtgagccccattgtgtataaagcaaaccatcttcaattgataataagagaaatactaaaggttaatgtaactaaaattgctaaaaagaatatgggagcatgttgtcttgttcaaaagttctattgtttagatgaatgaatgtagattcatcgcgatcgtatttgtgttttgtttgcctattttcttgatttacttcatcttttgttcttataattcctcagatgatgtagcactttggtcacaactgggaacatcagaatttctcttagccacacgaagtgtgcatcattgctagatatgcacctccaccagtatatatttggcggaagaatcaaagtataaagaatatgttcctcgatcctcgcacctatgtcgcatggaaattattaaagatattgtccatggatagcttaaatgatagttactccgccaaaatctgaagaaaggagggcaaaaatacatagagagagaaaacaaaaaacatttcatcaatgtaaatcgttactatcatgtataggaatatccaggaggtcaacttctgtttgtgcttatttcaagtgttgaagcaacttacatatttgtatgaattatgaaagatgataaatttgacaatattcttttggtttaactggtttcgttgcagaccattctgcaatgtgtgttaggcaccattgcatgcaaaaatcttttcgctgccattgcatgttcatgtggtgttgccctgcctgctcaatcacaaattcataactgcgctcagttgtaggtgtagccctgcttctagattgaaatctcaagttattatgttataataatgggctatacgtgccaatacaaaatttgtttgacatcatctagttatatgaactacttaactgctttatgttttgtctaaccgcctacagaatgttcacaccagaaatagttcctgactatatctcatattgctgaggtcaagtactccttccattcagaatactcgggaacttttactgtaccaactttgagagtttttgactgggtatatatgttcaattaattaaagggacaacaatagtgataatagatttgtgatcattccatgtatcaacttgatgtattgctattgaaattctgaatcttcctctattgggaaaaaagatttgtgataaaaggtgctttaaagatattactccctctggtcactaaaagaaagacttatgacagctaaattgcactacatgcagtctatgcaggctgtcttaaacatcttcttttaatgactggagggagtatatgctttaatttgcgtatgcatatatcaaaacttaactttaaacaaaaaagtcaaagtggccaagtatatggaaacagagtattatttgatttattttttgtagtttatatagctgttaatatgttttcagaagtaaatattaatattccatggtgtaggtacaaaatgtaatactgtgaaatcctgctttgtttagcatcactttcctcttgcatattttcctttctcgtttctgctttcatctcatactcttgttcgatttggatagctcagttagaaagggtaagatcaaagcatctccgtgcctccacagcaaaccctggattcgcaattattgaggcccctccactataaaagggcatccagccacaaggaatgaacacagccagcaagcagacaacaaggacaacacagcaactgaaaccctagtaccaagaacaaacaactacaagagacttcgcaagttcacagagtatgcatcacttgttcctcgttcttatgcccatgcattagactgtcactgtgacatctctattgattgtccattccccttcaaagtaaagtatgtcgtcctttatggctattaaatctacagctagtttgtctaaaaaagtctactttcaatttaaataagttatatgcaactatgcaagtgtgattttctccttgtgatgcatgatttatgcaatttaattgattgctttactaatttccatcagatataggaatgattagttttcctgtgcatgggcttttacttccttttcagttagtacactaacttggaaacataatcgattttagtacgtccaaatgattgatcagggtgcccttttggtcaagcttaagcctattttaaggcagcttttgcttaatctctttctccatgtctgttgtctccccttaaaatattctctcttttttagtttgtgattgcatgtcgtacaagcatctaacaaaggccaaaaaaaacaatgggcctcaaattctcagtcttctagctcccatctggctagacatcattgcataggtgactggtatattcctgtgtataatgataatattgcaatacaccaaggttgtttctgtaatgtctgctcatatatcatacagatatatgaagaaacgtgtagttgcctttaggtttggtatacatttgttttgttatgttctgaactacactccacaacttgttgagacatgcatggtgtgcagggctaggtgttgactgcgaatgaacatccagaggaagcctggagattggaactgcaagaactgccagcacctcaacttcagccgccgtgattactgtcagcgttgccgtgacccacgccctgacttgcagttcagtgacagctatagcacgggtggtgtgctgacctccctggacatccgtccaggtgactggtactgcagctgcggctaccacaactttgccagccgcagcagctgcttcaagtgcggcaccatcgtcagggacttcccagcaggacaaggtgcagccggtgctgaggttgacttcgctcgtggacgcgacagcgccgcagttcgtgctgggtggaaagctggcgactggatctgcacaaggtgatcaaactatttctgcttcgtttcagtaagatgaaggaaaatgaaggaatgccttcgtatgcatggcaataaacagtggcatgcatttgtgttttatgctgaatgctgattaaacagcagcagttcttcatagaagttgatcttatgggtttgcttggaaattgtcttgaggcagacgttaatatactgtgtttctgtactttggccaggcctggttgcaacgtgcacaactttgctagcaggatggagtgctataggtgcaatggaccaagggaggcaggtatatgtcttcgtcagtatacaactaggatttcaaattttgtgtcatttttatatgtgtaatcagttaagtttgcatgcaatgatcagtctagaaaagcacattaaaatcttacaacaatgattaatctattagatgctagctatctaatcaatcaatcctgatgcctggtgaagtgccttttgatctttcattattctttcaaaacgttgatgcatcttttcacttcgaagagaccttttagtctgctctgggtcctcaaaaacggaattgttctgatgtgtagcaggcaccgggaagtaagaggcgaccgaggtgataccaagaccgtgagatgtgacgagctggccgagcgatggaaccaactgctgtcacacactcaccatcaggcatccaggaaggatgagtctactacgtacacaagtatattgttgattgccatttgccaagcgtagtaccgctgctgccgttgcgtgggtggagaagtacccaagcacaacaaccgttacgcgcgcgcgcgtgtgtgtttgctctttttttttgaggttgtgttgattcagtaactgctgaattttacggcttgatgatgtacttgcattatgtattggtcttaaacagcatatataataattatctaataagtgtttgcttatctatactctgttggtgcatgaccctacgcctattactgatcaatgttttgctggtcttgaaacctgtgtggtttactagcatgtatcatggcattgtcttttttttttgtgtgtgtgcacgcgcacgcgctgtcagtttatttatgccaagcatgtattcgtaaacattttacagtcaggatgacacttgagaggatgttttgctgacctgatttgcgttgcttgcggccttgtttagttacacctgaaacttttcaagattccttgatctatatagctatcatcgactaattccttaactatcatcgtgtgtctcttctctctcctttttcttttcacacatatccaatggtcgtacaattttccagtgaggtcaaacaaattcctccaattttctgttgatgagctccattacttgattgataaacctaggaggattatccaagtctctgattaattatttagtttcttgggatctcttatatatttaaatttttt

SEQ ID NO: 5008 - DNA, 20784 bp, Sorghum bicolor
ttgcctcggtaaatgaaacaactgcctccattaatccgtcgggcattttgcattttatgagacaattggttttttaaccaccttagttaataaatgggtaccacctctcataatcatttctatagtagtgtggctaggtcttggtgttggggatatttatactcctcaatctggttacactcattggtgagcaaggaggagttcaagcttagtggagtgatgggatttgctaattgcaagattaagggctccattagtgcttgcaaagtatcaggtgtgcatcctctagtctcattaaccttgtttaggtcaagtgagagtttgtgcttgttactcttggtgatcgttatcacctagacgtcttggtggtgattgggaccacagagtatgttggtagttaagtaaatatgtgttattgctgagtaatgaggcgtgtgcatgttaaaattatccataccacgaagtgtgttaaagaacatgaaacaatcaccaaacaagtctcatcaacaactattgcttacacctatgttaccacaaaccgccacacatgtaccctcagtgacaagaagttatgttatgacaaaggaacacacatgaaccctccccgacaacaagcgacaaaaaccttccctacttccgtacaccccctaacctagaaatggaataatgtttggagtgagactacatacgtttccgcacttgctggagtaggttaggggttgtacggaagtagggaaaattcttgtcgcttgttatttaatttatagtaatcttctttaaataattaagcacagggacaaacccccttcactcaataacccatcacgcaacgaagacaaaagaaaattaaataaccaaaagaacttgagatagatacaaaaaaaatatctcgtggattgaccaaagtacacatatccacccgctctaacaacaagcgcaaacaccttgcctatttccctgcacgaccaaccctgtgacaaggattataagctcgtcctcacattacatatatggaattgttatcgtaaaaaagaatgagtgcattcttttttactattaagaaacacgagaaaaatcatgttttttttttacctttccatgtgagagtctgctcacgtttaattcgtttatacagttgaaagtgtgcagttatactgagcgctgataattccccgccgtttatttgcataatacttttaccttttacaccagcggcatggcctgtcctgtgtgtagaccggcacttcacgaactcaatgacacaacgccattcttttgggttttggcgcgctgttggcatgtctcccccgttgcatgcaccctatcatcacatcttatatcatcacatcttacagatgccactctaatccataagcttatctttctgatactagtaggcagcacacagatgcatgcccctgaaaaccacaagctttaccttccttttccaatcaaaaccacgtactgtacgtccccaatggtcaggcgcttacgcttaggcaaccgaccgagaaaaaggcagcaaaatctcgtgtgagaatatgcaaacaaacagcaatgcatgccgagcagacaccaccggcgagttcctactgataggaaaaggaaagtgtgcagcggacgtggccgaggacgacgcgtgaaccgcgcgcgcgcaccctgcccgtgtccgggcggccggcgggctaccaccgtttctgctcacgcgccgcgcgacgcccagagcgccttctcagaccgtgatccggccatccggacgtgcgtttcgtctgcgccccccaaaacctcgtccgcgccacggcggcggcgacgcgcgcgcccaccggctcccgtcgccgccgatagtttgccggacctgtgtcgcctcctataaatggacagctagcagcccccctccagcatctcctgcatctatcgatcccatcttttccttggcactacactcaacagtcatcacaactgcgaggagcgacgctacgacctctgcgctcaggatcaccatgccgccgaacaccgtgacctccgcgtccgtcgaccagaaccttgccctcgccaagcaatgctcgcgaggtatagattcaaccacaataagcatctaaacactacactgtggacacaaatttggtgatgctttaatttgcttattattattagacgacgatgatcgatttctttgttgcactgagatccttgagtacatcgatcatgtctccatgatgcagaggccgccctcgctgggttcaaggcagcagctatcgggaccgtcgcctctggaattgccaccgtgagtgttcatctatgatctttctcagcatgtagatctgatcgtgatagcatataataagcctgtatgtgattttgatatcctctgttgttcagctggttagcgtcaggatgctgccatgggctaaggccaacatcaaccccgctggccaggccctcatcatctccacaggtacatgtacatctcactccccctacaatttaacaacctagatgccttcacatgtcatcagtgaaataaacatgttcttctacatataactgatgcctgttttgctccacgaaaactggatccggcagttgctggcatggcgtacttcatcgcggcagacaagaagatcctcgcgctggcgaggcagcactcctacgagaacgcacctgatcacctcaaggacacctccttccagggcaccggccgtccgcacccagggttcttcaggccgtgagcgaggaagctatatatggccctgctggaagcactagtattctcagccgtcgatgcagcatgtccaaacaataatctactactactagcctaataaataaataaataaatatatatatatatatatatatatatatatatatatatatatatatatatatatatatatatactactactactagctagtagacatcggcgatcgatgtgctccgagaaactgtaatactcctagcttatagtgctccagtttactgtatctagctaccttccatcatataaatgatatgctagctcctattttttaaggccttgtttagttccaaaaacttttgcaaaatgtgaatagtaccaatttcgtttgtatttgataaatattgtccaatcatggactaactaggctcaaaagattcgtctcgtcaattccgatcaaactgtgtaattagtttttgttttcatctatatttaatacttcatgcatacgtctaaagattcgatgtgatggggaatctgaaaaattttgcaaaattttttgggaactaaacaaggcctaagtatacaactttttgtgctatatgaccgcaaaaaaacatgcatgatggcaaaaggcttttcctcttcatatcaatcatcgatgttgtacactgtgcttctgtgccgcccgtgtgccgtccatgcatgtaccgcaagggggtttgcacaacacgatggtttttagttatactccatcatgcattcatacacacattctcagacccctaattagatacaagtggctggtgctcttctctaactatgcacacaagctaaacttcagtatttccaaaaccttttttaacttcagagctagaataaacagcaggcaagcacaacagacgtggttgggatcaacttgacctaacaaaacctagcctctttcgtcgacggttccacttctacaaaataacaaacccccaattttccactattttattaaaattcaaataaattttaaaaatttaacatggttggcgtctcctaacatttaaaaaaatcaacttcttggctccatccctgcaagtcagggtcgaaccccttactcatctcatcatgcaacgaagacagaaaataattaagaaaaatatacaacaaacacaaattaaaacagtgcatcattgatggacatctattgcttatagttatgttatgaacttaatgacgatgatcactacaagaaatgaggctttacatgacgatttctggtgacgttctaagaaagcatcatagaattctattatctgtgacgttttatttctgagatgataaatctatgatgactggtttagttgtcatcactgatggatgtcacagatgttattcccttacaaaatgatgcaagatcaagagtattggatatcgagcccaagacatatatattcattttagattggtaaattaataaaaatagaaataaaacatttattcatattaaattggagtgataatgacacatttgtcttaataaaaatttaatgcatgtttacttttttgtcacaaccttggctatgtggtcacacgtttgccttaattaagtagctaatgcactttagcttgttgaactaaatagccaaggcaattaaactggtgattgaaatggtaggcaaacatgtaaacacacttatatgacttgcctcatcatcttatattgctccgaggtggacacttgacaacagtagcccacaaaggcccattatcgacttcagtatatgttgatttgtgaaaccctaagcccaacacatcatccccacgccctccgctcctgcagccgccgcccaaccaaggatgccagctgctgcttacggcgtcgcttctctccccgtcgcgagcgcggtgccgggcgctgaaagacctccgatcgacacccagccccttctccatggcgcgctgcacgtagaactgggtcgtcatcgacacgctgcgtcgtcaccatgcatcctgccgacaagcggggcgccatggctcgaatccggcggcctccctcagtcttccctcagatctcacaggtacggcgagctccctccctctccctcggcagctaatcaacgatggggtggttgtccttcttctcccttgttggatccatgccacagtggccagatcgacaacatggtggtggccacggcatcgagcgggcgggctgcacgggtatgttcgtgtgtggtactcagcagattggctgctgactccaggtgaccagtcctccctcaatccctctcctccaacccctgagccccgatgcctggcctcagatctggcagcaacgatatggggaaggtctctgctggatctgaataaggtatgttgtttccctctcccatgttcaattggattggtgcatgatttgtggtacattaagtttggtgccactatactgtgtgatctgtcatgtttggtttctccaacgatgcagatttccctcaaattacagagtataagattctcaaactgctggagcatggtgatgtcgcttcccctcatctaacatagaaatctgaatcaggaggcattataaggcccatatctaaaatttgattccattccgtgcttgatatgtgttgctgccaattcacttactaaactaagtagatatgtgttgctgccaattactgctaactaccaaacctactactgaactaagttgccagttgccttgctaccaaacctgccttggtcagtcttggaaatgttgatatgtgtaccaacactctgtttttattgtagataacttgatgccttgttccttgcctacggtttaatttacctacatactctcatggagaaaactacatgtgttattttcagggagacaactacagagactaggaccatgatgcaatggattttttgaaggagtgtcaccatacagaaaaaagttcaagcctatgcactagctactagaatgctattgtaatagatgtgaaggtcgataaggacctattttgtgtttccttgtgataatcagaacatgttatgttaatgtactggaaattgagttactaaattgttgggctatatgtgattttcattatatgatttgtgatggtcgattttggtgaacacataacacttacatgacaaatcaaatctatgatggaaagcatcctacgtgttaaatggctatgacggtcaattttgtcatacactattgggcctaatctgggctaaatggacttccagggattctatgacgaacctaaatgtcaatttgtgacggcttaatttgattcagcaaatttatgacgtgagatacatgacggttttttctttcgtcatggtaagttaaccatgacgtatttttgactgtttgtgaccaaagtaaccgtcatgtaaagccttgattcttatagtgatgggccacgtatgaacccatcccgacaacaatagacaaaaacttttcctacttccgtacaccccgtatataacgtttcttatccgtaacataatttacttctagaaaaattcataggaacttttcttgaatgcaggggcaaactcattgcatatagttacgttacaacaaaaggccacacatgcacccaccccaacaacaagcgacaaaaactttctctacttacgtacaccccacaagtccaaaaccatcggaccgaaaaaggaccctacattgctcccacatgagcgacatgggaagcgactcgaatctacacagtcacttcctttcctccttccctcgcgtcgtgccaccactggagtaggccgctgtcatggtcgtgcggcttgccataagggcggcggcaggggccttctttgtggtcatgggtgcggtggtcaagggcgagctcatgtgtggcgtcatggggcccgtgtagcggcggtctagtactgcttgctcatcttggcatccggatttgacgaggcatgggtcggatccatgtagaactaggtgttgggcgacggtggctaaggctacaaccctcggttcagcgtctagaacatgcgtggtgtggctgtgtcggcctaggacaccaagggcgggcctcatcctcttctgtgcttggctatggtggcaacgtgcgtagcagtggactagcgaggcatgcactcgcatgagccacgtggggctcgatggggccacctgctagagccgcagtgatgccgcccagtgcccgtgctggtgtcgagtagtgacggggggcttcttcatcttcctcaacatccttcttttcccctcgaccatgcatccatggtggacgcgtcaacgtcaacggaggaaactgggtctggtgccctgttggccaaatccgacacccccaaggcaaggggtagcgcttgtggtggagcatatgtgcctgacggttgctgcaggagattggcagcatcgacgacaggtgctcagctagcgacggctactgcatgtggtagaaggacacgtgcgatagggtgaggctggttcttagcatgttgtctggtcgatgggggtcggcgacgcagttgtgcagctgctacgagtagctggtacgttgatgcctctctggtgaggcttctataggatgactggtagtgacgatggcggcgacagtttggggtctagcatttagtttgttgggggacacctcagctctggcgaaagcctagcaatggtgatgcatgcggcaccgctttccctattggggcgtcgtgtctctggcaacatcttctgtatgtgaaaaccaggtccattcctagatgagcgacgacacacactggacgttgtaaccttactaaaggcgttacttgagaaatttcgactcgatcatgatgtctcgagtggcggacaccctccgcttctcagtgcctagtcaacctcttattcaacagttgggtttgtttcggacgcttggcattcgccacggatgcggcaagaggatcaaggctggaattcaaagctgctcttcgcgatgtggttgagctcggcaatgatgacttgctataacctctcctgcttggggaccttcagtctcacatcttagttgggttgtctgtgagcttccatgggaagtcgaagctactggctgctttgcaaccatgcttggcagctatgactcttggtgatgtgttctctgtcgcgtttgcatgggtgggctagcctttcgtgatgtgttacacaactgtttggctccaatgcttttatataaagttgatgtcttcttatcaataagagccggtaacggatatttcaaaaaaaaaaacttatgtacaccccctataacgtatcctaggcctgcaagcatggaaacgtatgtagcctcactccaaatatttttttagtaacatttcctctccattacataatgtatttctagaaacaattataatattttttctttaattaatggcgctgccgagtaaacctatcactcaccttatcaggcaacatgaaccaaaaaaataattgaaaaactgtggcagaacctcctgaattaagtggcccacatgcacacatcattgtcccaaagacttctgatcgacgtgcacgagttccaaatgactcaagaagtctgtcgggtgtcctcgggaaacccgaatcatccacgtaacattcttttcaggaattccctcatcaagcatcacagtattacaacatttcatagataagagaaatcagagtaaaagcggaaaggttacataacatagattgaaacttaagttcatagtttacaaaccataagtatttgatacataaaagcttcggaactttatattacataaaccatagatcacacaacaaattttacttgcccaaagtcactcatcagattcatcatcatcattactctcctccacaagagtaaagtaaccatgaccatcaaaaggattatcaagaggttcacctgcaacatgggttaataaaaccctgagtacaaaagtactcaacaagacttaaccgactataaaagaggtgaagactcaggtatgcaggctatggggattcaaggtaaagctttaacaagatcaaagcatttctttttgcataaaagcttactaagagtaaaacctactttcaagttttaactcaaggtcatcatttatgactaaccaaaattatcatcaaactttcataatcataccacctctttcttaaaccaaagattcacttattactacgatgatggtacgaggattgaggctccatatccgaggaaacacggcgattcgaatcgattaaacccagctggggattcagtaccacacgacatatgtagaacttaatcttgcatatgtcaaccttttctatagatcctcccatacaagaacgggtccagcgtcacccgagagtacagcacaccaccatcctacagccaatctagatgtttcccggtcatctcagatccgtaaggtgggtacacgctactctcgccatctctccactcccagtacgcggttagccgttctcaagtatcggaatagctataggtaaggcttaccagcgcatgtgggctgtactcaaaggtctcaatcacaacaggccaatcaacggtacggtccttaatcgacacagttggagacactactttaagactccattcttaaagcaagtccaccgacccgtcgcaagtttaaacatgattaaccataaaagtattccacaacaacccttcaaactttctcatttgaaaacttatctaatgagcagggctaagcatactaagcattttcataaagcaagtatcaaggttaatattgaaatcatcaaggtagataatgcagcaaataggattcattcaactcctattcacctaatgcatcatattaactcaagtgatataaataactttatgaaaatacaaggatagggtttaatgtccggggcttgccttgaccggaagggaagttcggcaactcaacaacactcgaaggatccacaaactcggaagaaacccactggggatcagattcttccggagcgtattctatacgtaaaagtgcatatgcatgattatgatatactcatggcatggtaaagacaggttacatgttcttggatgacaacaataaacataactatctcgagtacaatttaccttcacggtatagaaacaactaacttagctacccaaaaacatagattatttctaaacaagttttattattttcattaagcaatattgggtatctatcaaacaataaagatcatatatataaaataaatcataaccagggagcatatcatgctaagtaaccattggttgccaatcaatctaaaatatcacacaaagcctaaaggaataattatttctatttcttttataattattttaaatagctttattaagagacagagcatactttatcaaacagagctgaaattattcttgaagctagataacagtaacataagatcacatattaaatttcataatttttggatatacccataatttactaaaaatcatggaaggtttattcattaataaacagaggcaatttatagatacatgcaaactaacataaaataaaatttaatatttttcctacactctttacattctctggaacccacacaaaaattttcataatttttggatcagcacaaaatttactacacaatttcaaatataaaacaaaaactgcataaaagaaaaagaaaaacaagacagcactgtgccactgcggcccaggagctcggcccacgcgtttggcccaaaccagctcgggagagctcccccgcgcggaccgcgcgctgcccctcacctcacgcagacactgatgggcgggtcccgcccgtcagcttcgccttctacctcgcgccaccgctccggcgacctccaccgcaacaccggtgagctcccggcttccgcagcgaggcgcgctagcttccccagatccttgcgcacccgtagacctcctttacacccgctctcccctaccctagctgccacggccatggacgcggcggacggccaccccggccgagccaatgccggccactacgcttgagtagagcgcgaattgagcagcgcaagagcatcagtggctcaccgcgatcccaaaggaacaagaagcagcgtcggagaagctcggggtgatgctggccacggtgaggtgctcgcggcggcgtttcggccggagatggagaagatggtgacgtcccggcgattgagagggttatggagtgagcttggtggtgctctgggttcgcaaggaggtggcggacatagtggacagctcaatttgatgcgaggaggatcgagcacggccaatttggatggggacgaggtgctgctccttggtgctccggtggcagaaaagaggtcggtgctcgcagtatagaagggcacgtcgtgctcctggttgccagcaggtgctccacatcgtcacggacgtgaacacgcgcgtggacggggtaaaacggtggccatgcgctggcattcaccgatcaactctcggctgaccaccgccatgaacaggagccaaagcttatccccccctttttcccaaagtactctctgtctttttgtgaaatgcaaccaaactttgaatagaagtcaaaatttcatcaaaataaaagttgtacaaaattttgtgagctacaaaacatcttttggtggccagagccaaatctgagtggaaactagtgaatttacccaaacaattttgaaattcaaactcaaatcaaagaaattccaaatttttgaattggggcaaaacagaattcccaaaattacttttgatttcgtataacaacttgaaaaactcccaacatgaaagttgttcaacttttcaagccctacaactttcatgttgaccattttgcaaaattccaaacagattttgaattggggatttaagtttgaaaaggggacactttccggaaatctgtatttttaaaattactttggattttgtactgaatcttcaaaaactcaaaacaccaaagttgtacatcttgacaagatctacaactttgcttttgaactcaacttcaaattttgcttggtttttgaattgcacaaaaggggacaaatctagggttttgaaaactagggttccccccctaagtttcacccaaggtttttaaactccaaaataaacatccatacataaattaaacacactttaaattcttaagcacattcaaccaaagttaaacttattttaagttaatgcatcagggtttacttaacaataaactatgcaatgctcatgatgacatgtcatgttttagttcgcttaacacgagagtgttacagctctttcccccttaaagaaatctcgtcccgagatttaacttgaaggctaactaatggaaaaggaagtttatcaagcacttccaaaaccaacttttacaaaaacaggggtagatcataacactacagattacaaggatagcatagaagaaaggaactcaggaaaactttctaagagaaactcttcggattcccacgtggcttcatcttcagtatgttgattccattgcaccttgtagtatttgatagttcttctacgagtgactcgatctttttgatccaaaatcttgataggatactctgaatatgttagatcaggctttaactcaatttcttcaacatgaatgatatgatcaggcactcgaagacatttctttaattgagagacatggaacacattgtgtactgataacaactgtggtggtaaatctagacgatatgccacctttccacatctttcaaggatttgatatggacctatatatcgaggtgccaactttccttttactccaaaacgagttactcctttcataggtgacactttgaggtatacataatcaccagcctcaaaggtaagagatcgacgtctcttatcagcataactcttttgcctggactgtgctatcttcatgttctctcgaatgagcctgactttttctttggtttctttgactaagtcaaccccgaagagactatgttctccaggttctgaccaattcaagggtgttctgcaccttctgccatatagagcttcaaatggtgccatcttaatgctctcttgataactattattataagagaattctgctaaaggcaaacattcgtgccacttctctgaataactgagcacacaagatcttaacatatcttctaagatctgattgactctttcagtctgacctccagtctgtggatgataagctgtactatgcagaagtttggtacccaaggacttatgcagatgcttccagaaagcattcacaaattgtgtccctctatcagatacaatagtctttggaacaccatgtagactcacaattctgttaaagtatatcttagcatagtcagaagctcgataatcctttcttactggaatgaaatgggccgatttggttaggcgatcaacaatgacccatatggaatcaaaccctctcgatgttctgggtaaacctactatgaagtccatactaatgtcatcccatttccaagatggaattggcaacggttgcaattctccagcagacctaagatgaactgctttcactttttgacaagtatcgcatctagccacataactagcaatttcaagcttcatcttagtccaccagaatctttgttttagatcatgatacatcttattactacctggatggattgaaagtcttgttgcatgagcttcatcaagaatttgttttctgagttcagggacttttggaactactaaacgatccttgaaccaaatcactccagcttcatctattctgaacttagaatttggttcagactgaacctttcttttcaaaaagattatacccttattttcttgctgggctgtaataatctgatctttgatagatgactgaactgtcatatttgtcaaactcccttgtggaatcatctcaagacctaacttttcaaattcataacataaggtaaggtctataggcttgacttccagacaattgcaatgactctttcgactgagtgcatctgccaccacattggctttgcctgggtgataatgtacctcaatatcataatcttttatcagttctaaccatcttctctggcgcatattcaactctgactgagtaaagatgtatttcaaactcttatgatcagtatatatgtgacaagtattgcccaatagataaagtcgccagatcttcagagcatggactacagctgccaactctagatcatgggttggataatgctcttcatgacgcttaagttgtcgtgaagcatatgcaatgactctgccttcttgcattagtacacacccaatgcctttgcctgaagcatcacaatacacatcaaaagatttttcaatatcaggttgagctagcacgggtgcagtggtcaacaactttttcaaagtccgaaaagcttcttcacactcgaatgaccacacaaacttggtatcattcttcagcagtgttgtcattggtttagagatcttggagaagtcagggataaacctgcgataataccccgctaatcctaagaaactccgaacttgatgtactgaagttggtgacttccagtcaagaacttcctgaactttgcttggatctactgcaacaccttcagctgacaggacatgacccaaaaattgaacttcatctatccagaattcacacttgctaaacttagcatataactgatgttctctcaggcgagtcaacactatcctgagatgctcttcatgttcttctttagttttggaatagatgagaatgtcatcaatgaataccaccacgaatttatctaactctggcataaacactgaattcatcaagtacataaaatgtgctggggcatttgtcagaccaaaagacatgaccagatattcatacagaccatatcgggtagtgaatgctgttttcggaacatcttttggcttgatcttaatttgatgatacccagatctcaagtctatcttcgaaaataccttagcaccagttagttgatcaaagagaagatcaatacggggcaaaggatacttattcttgattgttacttcattcaaaggacgatagtccacacatagcctcaaggtattgtcctttttcttcacaaagattgccggacaaccccatggtgatgaactaggtcgaatgaaacctttatccatcaattcttgcaactgagtttttagttctgctaattcttttggtggcattctataagctcttctggatattggtgctgtccctggcttgagctctatttcaaactccacatcacgatcaggtggcagaccaggtaaatcctctgggaacacatcaggaaactcacagaccactggaatgtccttgatttccttgacagagatagcacatacttgctcaactgctctcttaagggtaggaagatggataagaagttgagacttgctattaggtaagttgaccttgatggttctatttaaggtgtctataactgcacctctctgactcatccagttcatacccaagatcacatctatacttggatcttttaacactatcatggatgttggaaatatatatccacccaagtctattggtacctgatgtaccatctccttagtgcatagtcgacccccaggtgactgtataaagaactcatctttggttgcaccaataggtatattatgcttttccgcaaatgctctattcatgaaagtatgtgatgcaccagaatcaaaaagtgtaagcgctgagtgttgggcaacagggaacataccaagcatcactggttctccctcaggtatagcttcaacttgagtatgaaaaacccttcctgttttctgagtacccttacccttctgctgattctgggcattacctttgttttgatttgcttgctgatttccaactagtcttggtgcattgacatttgggacattttgccttggatatggacattcacgagaaaaatgtccactcttcccacaattgtaacaagggttgtttgcagcttgtggcattggcggacgaatggcaggaacattcggctgacgctgaacattgaatggcattgtcggccttgcaaaattcctctgcatattctgctgctgaggcggctgataagaaggacgataagatgggcggaactgctgagctggatgatatacaagcctctgacgcttcttgttgccgccagatgatccagaccctgagacaaaacccctcttcttcttagcctccttatgtttgcgattcttttcttcactggagatagcaatgttcactgcctcatgataagatatattgccacatgatgccatcattagctggagctttgtattcaagcctctcatgaaacattccttcttcttttcatcagtgttgacttgctcaattgcatattgggacagatgattaaactttccaatatactgcatgactgtttcatccccctgacggagagctaagaactcttcgagcttcattttcataactcccttgggaatgtaatgagccctgaaggcttccttgaattctccccaagtgattcggtggcgggctggttgaacagccagtaagttttcccaccaaactcctgctgctcctctcagctgctgagcggcgaaaactggcttctgggtttcagtacagttgatgagactgaacttttgctccatagtgcgaagccaatcctcagcttcgagaggttcatcagcttttgtgaatactgggggacgagtatctgtgaagtcaacatatgtggtttcttctcggttatttcgaccacggccacgctgaccaacattctgattctgtgctaacaaagttgttgcattgaccaatgctgcaattgcatcagccaaagagggtggaactggtggtgcattaggaaaatcatccccaccctgggaagaactagctccatggttgttagcagacatctgtttaaaaacacatcacacttcgattaacatacttacttaaacatcatacatcatggcttacatagcacaaacagttcatcttatttatcatacaagtccgctcctgggcaggactaccgaaaccactatcttacacacttcccatactagaggttttctgactaactaagttacaaagtcagaagatcacactaggtcatacttcttgccttctcaacacctagtcgtcatccatatccgactcactggtggtaacatcctcatctggagtgggggttcctggttcttctgcttcatcctcagaagtatcactatccacttggatgacaactggtccttcctctgctgcttcaggagcctcaggtggattgagggcatcctgcagctggtgcacttcctcatggaggatgttggtataggcctcaagattgaccacataccccgccatatggtacagctgaacttccatgttgatgttgtcagtgagcatcaggcgcatatcattcttcataagcctgtaggtccttggcgaaggaggacctccgctggtgtcactcccgtttccatcgctggagttgtcagtgctgctgtcgctgctgtcggagggtggcggatcccttgatgccaactggtgccttgggacacgacctccggtggacttgcgagcggttaggcgggtacgagccatctgccaaaatatttttattttgaatattagaactatatatgttccaaggttaaaggatagagttttacaattagataaacatattacctctaattattaacaactttaaggaggaaagtctattacatgttttcaataatgatgcatgaaacgtacttacgaacaaagcatacatcaaacaattaattagctttaatttagtcacttaacataaaagtgcataaactttcttttcataattagggcaatattataatattataagcatcgttccttgtatataaatatcaccataattatactaagaacatatccatttagagagaaggataagtctaaagaatgaattgagacaagttagaagcataagacgagcttagaagcaatttggactcaaactaatttgaaatttggtttgactcaaaagcttttgaaatttttaaataaatactgttatactttctaagggaaacctgctctgataccagctgtggcagaacctcctgaattaagtggcccacatgcacacatcattgtcccaaagacttctgatcgacgtgcacgagttccaaatgactcaagaagtctgtcgggtgtcctcgggaaacccgaatcatccacgtaacattcttttcaggaattccctcatcaagcatcacagtattacaacatttcatagataagagaaatcagagtaaaagcggaaaggttacataacatagattgaaacttaagttcatagtttacaaaccataagtatttgatacataaaagcttcggaactttatattacataaaccatagatcacacaacaaattttacttgcccaaagtcactcatcagattcatcatcatcattactctcctccacaagagtaaagtaaccatgaccatcaaaaggattatcaagaggttcacctgcaacatgggttaataaaaccctgagtacaaaagtactcaacaagacttaaccgactataaaagaggtgaagactcaggtatgcaggctatggggattcaaggtaaagctttaacaagatcaaagcatttctttttgcataaaagcttactaagagtaaaacctactttcaagttttaactcaaggtcatcatttatgactaaccaaaattatcatcaaactttcataatcataccacctctttcttaaaccaaagattcacttattactacgatgatggtacgaggattgaggctccatatccgaggaaacacggcgattcgaatcgattaaacccagctggggattcagtaccacacgacatatgtagaacttaatcttgcatatgtcaaccttttctatagatcctcccatacaagaacgggtccagcgtcacccgagagtacagcacaccaccatcctacagccaatctagatgtttcccggtcatctcagatccgtaaggtgggtacacgctactctcgccatctctccactcccagtacgcggttagccgttctcaagtatcggaatagctataggtaaggcttaccagcgcatgtgggctgtactcaaaggtctcaatcacaacaggtcaatcaacggtacggtccttaatcgacacagttggagacactactttaagactccattcttaaagcaagtccaccgaccggtcgcaagtttaaacatgattaaccataaaagtattccacaacaacccttcaaactttctcatttgaaaacttatctaatgagcagggctaagcatactaagcattttcataaagcaagtatcaaggttaatattgaaatcatcaaggtagataatgcagcaaataggattcattcaactcctattcacctaatgcatcatattaactcaagtgatataaataactttatgaaaatacaaggatagggtttaatgtccggggcttgccttgaccggaagggaagttcggcaactcaacaacactcgaaggatccacaaactcggaagaaacccactggggatcagattcttccggagcgtattctatacgtaaaagtgcatatgcatgattatgatatactcatggcatggtaaagacaggttacatgttcttggatgacaacaataaacataactatctcgagtacaatttaccttcacggtatagaaacaactaacttagctacccaaaaacatagattatttctaaacaagttttattattttcattaagcaatattgggtatctatcaaacaataaagatcatatatataaaataaatcataaccagggagcatatcatgctaagtaaccattggttgccaatcaatctaaaatatcacacaaagcctaaaggaataattatttctatttcttttataattattttaaatagctttattaagagacagagcatactttatcaaacagagctgaaattattcttgaagctagataacagtaacataagatcacatattaaatttcatgatttttggatatacccataatttactaaaaatcatggaaggtttattcattaataaacagaggcaatttatagatacatgcaaactaacataaaataaaatttaatatttttcctacactctttacattctctggaacccacacataaattttcataatttttggatcagcacaaaatttactacacaatttcaaatataaaacaaaaactgcataaaagaaaaagaaaaacaagacagcactgtgccactgcggcccaggagctcggcccacgcgtttggcccaaaccagctcgggagagctcccccgcgcggaccgcgcgctgcccctcacctcacgcagacactgacgggcgggtcccgcccgtcagcttcgccttctacctcgcgccaccgctccggcgacctccaccgcaacaccggtgagctcccggcttccgcagcgaggcgcgctagcttccccagatccttgcgcacccgtagacctcctttacacccgctctcccctaccctagctgccacggccatggacgcggcggacggccaccccggccgagccaatgccggccactacgcttgagtagagcgcgaattgagcagcgcaagagcatcagtggctcaccgcgatcccaaaggaacaagaagcagcgtcggagaagctcggggtgatgctggccacggtgaggtgctcgcggcggcgtttcggccggagatggagaagatggtgacgtcccggcgattgagagggttatggagtgagcttggtggtgctctgggttcgcaaggaggtggcggacatagtggacagctcaatttgatgcgaggaggatcgagcacggccaatttggatggggacgaggtgctgctccttggtgctccggtggcagaaaagaggtcggtgctcgcagtatagaagggcacgtcgcgctcctggttgccagcaggtgctccacatcgtcacggacgtgaacacgcgcgtggacggggtaaaacggtggccatgcgctggcattcaccgatcaactctcggctgaccaccgccatgaacaggagccaaagcttatccccccctttttccca

SEQ ID NO: 5009 - DNA, 2992 bp, Sorghum bicolor
aatcgatttcggtcttggcaaccaccaaccgggcgtgaacttgcctcccaatctcatacttcatccgatcagcacaggcaccaaccactgtggtaagcacaaaggggtcactccatggcgggatcacatcaggattgcaatgcgaacctatcctcttgagcagagcaaatgcctcatccactcggccacagcggacaaacctatgcaagacagcgtggcaagccacagcatccttcacgggcatttcttccagcaagtcgcgcgcagtgtcaagatccccagcaccagccaggccagttatcaccgcattccaggagaaggtgttcctgtcaggcatggagcggaacacgcggagcgccgcgcggtggtctccggacttaaagagggcggtgatgagggagttgtacgagaagcagttcttcgtgggcatttcgtcgaacaggcggtgggcgtcacgggagtaaagcggagagccgcgcacgtacatgaggaggacggagttggtgggtgggagggaggaggggacgtggccagatttgaggaggagctggtggagctgccggccagcggccgcgctgcaggagcggaggagctggatgcaggaggggacgtcgacggcgacggccatgacggcgactgtagacttggccacttgggaagaggacgggcattacctgcccgcgcctcgaacgtgttggccgccgccgtgccctgtgccgcttgactcgcctcgcgcacaggcacagccccgctggacagggcagctcctcgccgtcgcagcctcgcacgtggtctcccccgccaccgcgtcccgcgccgctcgactgattgctaggcttatctacgggagggggaagttggatgcggccgccgaagcctagctcggagggcaccaggctgggctgcggcggccccggcaagacgggatagcggcgagagaggcggcggctgcggcgcgagcgcgggacgcgcagcctgatatgatgtacggcggcgatggacgctgagcaagcaaggaacgggcaggattgtcagtgggatgaagctattatgtttcctactaattttaagagcatctgcaggagtacttttaaaaccaactctcgaaatcattatttagagcatctccaagtgtttttttaaaatcattttctatatcatcatttagagcaccttcaagagttttttaaaacattttgtaaatcatcatttaaaagctatataaataaaattgattcttcatccttcactaacttttttatatctcatgcatactttaaagagtcatctctactctctatttttggctagtgagaaattaaaaataagaatgataatatttagaaacacaattagagaagccgttgaagaatatttttttttcaccagaacctctatttatattgaataaaaaaggatataggagtctcttaaagttgctcttaaaaggccaattgaataaaagtgttctttcatcctctgataacttgtgcacgataatttagaaagtcatttctgttctctatcttttgctagcgaattcaaattaaaaaaaatgttggagaataattttttactaaaacttctattcatatcaatttgaacaaaaatataaaggggctctagaagttgcaagcatttttagtggaaatgatgattacacgtgcatgtatgacgacaaaagtgcaaaagccattgcacgtttaaaaaatgggtcaaattgtatttatactttgtttttttttcatagcacatatcacctgaattgcattgaaaacagcatacctaagctattttaaggatgtctatttgagatctagcacttttggtgggatatgatgccaataaaaggagttcatccaaaattagcctggcctcctgtatcatctctggtacggtgccatgcttgcatcgatcatatcatatgcatccggattaaaacatctcggagagagcagtgaacaataagaagattattactgactatatcacatcgaaggatgagcaacctaccgtcgcacctgaccagcctgcaagtgccccgccggggggccgtcgtcgtcgtcgccggagacgtggacgcggtggacccctacgacgtcccgcagccgcagacggccacctgctgcacggcgctgcagcgtggcgtggcttccgacgggctcgcgcagccgcggtacgcgccgctgcggacgctagcaaccgtcgacgacgacgacgaagaagaggatgatggcgatgaccatgattccaataacggcaaggacgacaagcaggacgacgacgacagcgccgccgcgatgacgacgaccacgatgaggagcgacagcaatagcagcagcaggaggagtaataacaagaagatggtgcgcaagtgcaagtcgacggtggatgagttgaaggtgtcgcagctcatccagggcccccggctccggcgcagcgtcggcatgcgccgggattggagcttcgagaacctcggcaacgccgcctagctagttcgctagctacaagctcttgtagctcgatcgctccccggctagctagctggccccccacaaggcgaggtttccattccatggctacacccccacaaactccatgcgtagatccgatccgccggccggcatggcccgtccagcagctttatttctgcataccactatatactttacggtgctacagtacacgtatgtaaatacatagtacattcttgtgtacatgctggcgcaaaattctacctgcaaggatctaatgttgcacaattagtaacatctacacgatccgaaatctatacatatgtatatacattgttgatgtgtatgaccgttgtaaaaaaaatgcaattataaaatagagctgagtcaaactgtgtcctgagtctgaccaaatttatacaaaaagttatcaataattatagtatcgaataagtattttcataatgtacttatgtgatgtaataagtattcatgctactttttcacaaacttggcca

SEQ ID NO: 5010 - DNA, 5631 bp, Sorghum bicolor
cattttatggaagctatacaaaaattctcacaatttttgaaccagcacatgatttaatacataaaatcaaacataatacaaaaactgcataaaagaaaagagaaaaaaaaacagcactgtgcttcactgacggcctgcttggacccggcccaaggcggcccgcgagcactcccccgcgcgaactgcgcgcgcccctccacacgcgaccactgacgggcgggtcccgcccgtcagagtcgtcttccacctcccgcccgtcgctccgatgagccccggctctgcgccggtgagctcccggctcccgcggtgggatgggttagcatctccggtcccttgcgcacttaccaaggtatacaaagcccaagctactccctcctactccccttgcctgcgtccatggcggacgacgcggcctacggtgcggacaccggctactgcgaacggatagaaagcaaaccaaagggcgcacgagcttgaggggctcaccaagacttcaaaggagcaaggagaggcagtggagagagtcggagtagtactggccacggtggagctcgatcacggcggcgctcggtcggatttggagaaggaaaagaaactccggcgcttgagtgggttatgcagcgagcttgggagtgcgctgggttcgcatagggatggcgaacatcgtggacagctcaatttggtgagagaggtgttgagcacgacgaatttgaaggggaagggcgtcgggtttctttcggtcatggacagcaaacagacgacgtcgtccacgtcggtgctcagaaaggagaaaggagcgaggctatgacgtccacgtcgcttggcgactctgacagcaagcagctgcgtgccctcacgctcgcaggcggcgcggcgcgagcggtggccgcgcttggacagagcgccgaggagcatatcggttactgtagacgtccatatcctccccattctgtcctttagcaaaaacagccaaagtttgaactaaagccaaaatttcaccaaaataaaagttgtacaaaattttgtgaactacaaaacatcttttggtggccagagccaattctgcgtggaaattagctaaattggccaaaccgttttgaaattcaaactcaattcaaagaaattccaaatttttgaattggggcaaaacagaatttccaaaattacttttgatttttgtatagcaacttgaaaaactcccaacatgaaagttgttcaacttttcaaaccctacaactttcatgttgaccaattttcaaaattccaaacagattttgaattggggatttaagtttgaaaaggggtcactttccggaaatctgtattttcaaaattactttgaattttgtatggaaactccaaaaacccaaaacaccaaagttgtacatcttgacaagatctacaactttgcttttaaactcaacttcaaattttgcttggtttttgaattgcacaaaagggggcaaatctagggttttgaaaactagggttccccccctaagtttttcggaaaaattttcacccatggtttttaaactccaaaacaagcatccatacataaaataaacacactttaattcttaagcacattcaaccaaatttaaacttattttaagttaatgcatcagggtttacttaacaataaactatgcaatgctcatgatgacatgtcatgttttagttcgcttaacacgagagtgttacagtgagttggagttgggtcttaatttgagctcctactttttttatcatagcatgtaaataaaaatttaaggttggactctcgacacatcagagaaaacggatagatagacaggcccaaatggccctagaacggtggccatcgacgactctacttcgctgtcaagtgggtccatgggctggagggcagtgaggtaggcccatgtcaccacaggcccaaagccggtccatccacacaccacagagcagcagcacaggataaacccctttggcaccgcccacccgtctgccggtctgagccgtctgtctcctcgcacgccctcagcccgttcggcgcaatgccaccaccgccggcgccgcgcttcctctcgctcgcctcgccgcctgcgctcctgcccgtacaccaccaccacaaccaccccaggagcctactacccccgctcgttgcctccaccaggaaggccgccgcgcttcccgcgtgtcccgtcgcgtccccgcgccactccgactacttcgaccctcgggccccgccgccgccgcgcggggacggcggcgggtacgggcgggcccccaacggcgcgcaggacgggagggtcttcaccagctacagcatctacaagggcaaggccgcgctctcgttcgaccccaggccgccgcagttcgtgccgctcgatgtaggtagaggaggttcgattgaggctccgttgtttccgtcattgttccctacgggtgtgttgcgctaacggatgcttgcgtgtgcgagttcttgtagtctggggcatacaaggtggccaaggagggattcgtgctgctgcagttcgcgcccgccgtggccactcgacagtacgactggacgcgcaagcaggtatgctccaattgcctcagcttttggtttcaacttatcttcctttttgattttggataagcaacccaccaatttgagtcaacccgtcgggcatggggagagaagagccgatatttgcagttgcagcgtagctagaaattcatcttggtgaaaataaaatgttgtagcaatttggacacgcagttttcaactggctgcattgttgcttctttgtaataagctgaaccaggaaggatagttactgcttcctcactctggccatgcaagagatgccatgtattatggcccatgggttctatccattcggatcctctgtgatctttcctgcttcatatatcttgcctgctgtatgtttttgtaaattttgcgacaagcctgctgattctttgtatccatctaatgtgcttacactaacttgtttgatgtaatttaatgctatgctatgcaggtgttctcattatctgtgtgggagataggaaccctgcttactcttggtccaacagattcttgcgagttctttcatgaccctttcaaggggcggaggttggtatcatttgatgcatcttattacccgagttcttctcctagcgagtctccccctaaggcccctattgttgtttagctctgagtgttccagaagagataccacaaacgcacatcatcatgttatgcacttatgcatcttgttattctcctagtcagttgcagcatatattattttcttgtgttgtctgtccagtggtgtaagaatgcagttatatcatcattgaacttctttcatactgtttgtgccaatctggtttaaggacttgtcattgttgcttatcaactctatttgtttcatcttatgttttaaaaggaatggcgattggggaggcattcttgcccctccttttgttacagttagcaacagaggagatttgtttcaactgtatttttatttcaacacacaaaatcttgctagctaacataatcttgatctcatccatccaacatctctaatcaagattgctgagtgagggttgttctatattcctcagtcacattgtctatagcatcatatatctagactttataagcatttttacatccttaaattcatcgtgttttatattttcttctattatttattgcttcaagcacattcaaccttggtcacacacatcaagaaattattaaccacattatcatttcatcttttgatatatacagtgaagaaggtaaagtgcgtaaggttctaaaggttgagccaacaccagatggcaatggtcgctttttcaacctcagtatgtagttgccaactcattgttacagattttggtctcatcaatttatgttcacagattgatctgataatcattattgctcgtactaggtgtccagaaccgacttatcaatgttgatgagagcatttacatccctataaccaagggagagtttgctgtcattgtatcaactttcaatgtaagtagcatatcctgtactcctgttttatcatcaatccttgtacaggtgctttttcgcaactaccctttttattgttatagtttgaaaagattacgtgagttctagttggtggattactttgcacctgactctgggttctacacttctacttccactgttctgcaaatagtgacatgttacatgatttataccatcaatcaatgattttgacagtagatttttctgtgcagtatgtaatggttgaattatgcttgtaacaacttgatttgattatgtatatttgctgcatattcaatcttcatgatttcacttttgattactctgttcatcctgccacattcttttggttaacactgccatcgcaatcttgtgtgaatgttgaatttctaaagtgtgtgggttactgctaacacaataggcaatgaagctagctttcatcatagtcagagttaacacaaacagttgggcacacattaccttttgttttcttttataggtaaagtagcatacaacattcatatccattaaagaaaataataccctattatctatcacctgtgcagtacatcataccacacctcatgggctggagcacatttgcaagttcaatcaaacccgaggagtcgcgcttatacagcaggcctcagtccacatcagagtacgaatggcgaaggtgacacgctgatcaaccacagcaaaaaaatggctacaactcacacttgagggatggaattgttggtatcgtttggctgggtaatctcagatgtggttagttgatggatgcctttttgggttactcctgtttcttttctagttattaatcaggcaggtagcacgacttctatccagatattcacgggctcgtaggggtcatattttgggcagcacatctcagttctgacattgaaggaggcagtagtggttgtgtaggttgccaatgcctcatgtgaatctgctccttgactccattgttggtcggactcagctgagaaatgcttttggctgccgggaaaggggttggcctttgttcatgaattacttgcatacatgagattattgtatgtatacatgtagtctgcgactctgcgttaacccccctgatcgttcaggtttttctgtttgatcgtttgggttttgagctcctttgaactgacggaacggaacaaattgcccatagcctcgcgctcccctctcaagaacggacaacggagggcggcgtgttgccacgaggcgaggccatgatgctgccgtgtgtgtcatggtctcatcctgggcagacagcgaaatccagccactttggccgctctgctgcgaagagtagcaccagtttgagcgaggggtagtgcttacagattcactagtcacattagctaaaaaaaggttgtgaactctgtttgccatgtgggcatcagaaatttcagaatgtgcggcatctacacacaattcaaaattcacctatggatcatatcagatacagtgaaaccacaaatcgtcctatcctggtgagtgtacctctctctgacttcagtaacacaacttgcaaccttatttgtccactttgctttccttggtttttgggacaagttgaacggttgaga

SEQ ID NO: 5011 - DNA, 3065 bp, Sorghum bicolor
acttattttaaatgtaaagtttacaactaaaagttttaggatataaagatttgtgatctaaatagactctaagactgtcataatttgatgtgttgcattgatcagtgaaggtggaccacgtgtgtgtggctaaatatcggtcggcttgccggcatcgtccgcaccgcctctagtttgctttgtcgccgtccttgggcggcgtggtcggtgccgcttcgggtagaacggagcaacagcactacacagccacgtcgcacgccgtgatgttgagtgggagcatatgtctttgagggcggcagaaaaaaaaaactttaccagcattggagaggtccaatgcatggtagcccagcatcgttctcaggcatcctagctttgagacgctgtaatagattacgcgtgtgcgtgtaattaaaacttgtgataattttgaggatgagatgggacaaggggacaccggcctttctcgacgaaccagatacatgttgcgcccaccgcgcgcccaccgcccacggccatctcacatatcatgtggtgttgacattcaaaattatcacaagttttcagagttttcgtcaagaacattgtgacaagacaaagggacgacatcgaatcatccgtggtgacgatcacgttaaaaaatgtgctccccagaaaacatatcatcaggtcttgacaaaggcgttttttctatgaagagataccctgaaagctcttctccgagtgttgtattcggagaaagctttcccgagtgtaattgggccttccccgagtatatttggcactaggggaattgaagccactccctcccgtagtgcgaggcatgccatgatattatcacaaggatatttggtgaccggtgagtggcatcagagcataaagtgaagatcacctttctgcggcacatgatctgtactagggattcgagacttagttctttttttttgttgttgttctaataaggtcttgtttagtagaagccaacagcatggctttgtcaccgtgcggcacatgatctgtactaactattctatggtacttatttttttttttctaattttgtctttaggataactcatgagctcttgcttacttttggcaggtacgtactcatgatgcttgaaagtttaccgtgtgccgacggtggtaggatgcctggacttaaccttggtataggatgcatggaacatagaaaaacctccctttcaaccaaaatagaaaaggctccccgcgtgttcaaaggggctatatctttgtcttgtgcgtaactcatcatcaagaacaatgggcgtatcataaacctaggggaaaaacaacgggcacatggaatcttatccagcgaccagcggtcagtcaagtcaagcacctgagatcttgaccaacgacgacataagatggcaatgtagtagacttggaggtcgtctatggccttgtttagtttaccccaaaaatcaaaaaaaaaagattttttatcacatcaaatcttgcggcacatgcataaagtattaaatatagataaaaataaaaactaattgcacaatttatctataaatcgtgagataaattctttaagcctatcatgattaaacaatgtttgttatataaaactgaaaatactgcagttctaaaaaccaaaaagctttcggaactaaagaaggcctgacaggtccttgaattgaattgtatccacagtgtactagccatggtccacggcggagtcgtccatggcggagtcaaggaacaagcgccgcagggcaagccaaatttcatcctcactaacaaccaccgctctttgaggcaccacgtacccttgcaatgtccctgaagtttcacccgacgacgttgactgccggggtatcctatccagattccagaccatgcacacacacttccgactataaacaagtctgtgagcgcagcggattttctaataatactagttgctacgctagcctagctatttatcaccaatcaacacgccaatcttaacgagaaaaaaaagaacattaaacagtagtaatcttaattatatataaaaactgataccggctttcaggcttgatcacacacgggcacacggctactctgataccagccacactgcctactaagcactagccatggcggacaacaacgacgacgacgacaaccggaggaaccgcgggcagacgacgacgacactgatcgccggcgcggggctcggcttgctcaccgtcaactcgggcctcgccatctaccgcgccaggggcgacgacgtggccgccgtcctcttcgtcgcggggtcgtacctcaccttgctccttctgttcgtctgcctccgcgcctacgagctggcggcgcccgggtcgccggccagggagcgggcgaggcgagccgtgtggccgctcaccacgctgctcaccgtggccttcgcgtggaaggtggcggcggtcatgccttcgcctgctgcggccgccgtcgtctgggcgctcgccgtcgccaccaccgtcggcggtttcgttgctctgtacgtgcagcgctgaaggcatgcacggacctagcatcagttcagggctctctcggctcggcctcggcctcggcggctccatcagcctagctaacttttcactcttgtgcatatatagtatatgtacagtagctgattggcttttacaaaacagagtgccttattgtagcaggtaacctttacctttatactaaaacctttacaaaacagagtgaccatgtaggctttaaagctgttaataaaggttacattagcactcggtaggcacttcgatcgcctacacacattagcgcttgctcgacccgtgtaatcacccccagtgctagctagcttttgtgtacatagctgatgactttgcctaaagacagctgtaacggtgttaagagcactccgaatgctccggcagctccgcgtggccacgttctgacgccacgcgatttggtctattgtgtacttgtattcgattcagtctcttgatttgcttgcagatttgaaaaaaaaattcattatagatttggggaatagaaggaattttagtttattcggagcagagattgctacg

SEQ ID NO: 5012 - DNA, 6719 bp, Sorghum bicolor
tatatatatatatatatatatatatatatatatatatatatatatagtataataaaatcattatggatgaaggaatttaatatatgataaggacgactatccaaaaataaaatattttaatcatatattcatagtataataaaatcattatggatgaaggaatttaatatatgataaggacgactatcaaaaaataaaatattttaatcaatattttaatggttataaatatataaaatataagaataatatatatatatattagttaataaattaaaatgaataaaaataaattctagaagtatacaaataaacaaaaataaaatactattaatattattagccatatcaaaattaattaaactttagatttatatattgataataatatgaaaattacattagtcatagataacttttaaataatggtacatattgcttgctatattaaaattattatcatttacatagttaattagtcataactataagatttaaatggttttaaaataattcatattttgtagatgcggataatatcatatttttttatatttttgtcgaatatggatataaaattggagagaataatcttaaaaaataaatacagatacatctatttacttaatactttcttcgttctgaattataagccgctttgactttttggtacatctatttactatatataatattacgtctagatatatagcgaaatggataaatttaaaaagtcaaagtaacttgtaatttataatatatagagggagtattcatattcaaatagaatataaatacaaatattctttttaaactaaaaaggatatggatcgatatcggatgtttctgacatctagacatctggatccatccttacttctagtgccgtagagaatatagatggtatctaagaagaagatggtatctaagtagtcactatgtggaaccactagtacacttctctgccatccgagttctactatataaagaccagtagtccttatcaacgtgctggtgtagtttggtggtgcagtgcaacaactgtcgtgcgaaaactgcgtgagggagagggagcgagccagcgggcgccatggcatccggactagtagttgaggaaactctgcacatggttcctggagacggagatacaagctacgctcgcaactccactgtccaggtatccatgtagtatttttttgagcgtcactctttggtctaattaattattaggctatttgattgaattgtcttacgtctgtcacattcagatgtaagctagcttgtgcacatggattcatcaatcaattaattaataactgaatttaacgctagaagagatgagcaatggagaactttaatttggtagtatatcacagcccatggctctttgtttaatttcttggctgaaatctcatagccgctttgttcatttggctgataggtcactgttggctgatttattgtgagagaaaaacacggttgagtggtgacagattcggctgataagctcaaacaatattatgagagaaaaacaccgataaactcaaccaaatcatcaaactgtacttttaaccatggcaggttttttttacaagggccatgacatgtttaatcctgtgtatcccctccctctcagacataatactgttgccagaacagtcgcaccgccatcatcaccgtctgatcctcagctcagagcaagtattatggtgggctgtaagctggctaaatgctgatgtggaggagagaaaggaggagagagaggagaagcaggctgtaagcttacagccagcttagacataataaccaagaaactttgtgagagagataagtggaccatgtattaatagtgaatagctaactattgtatgggtaggctgggagaagaccgtaagaaaccttacagtcaaagtgggcgccggctccgggtgtcgtcgccgcgtgcaaccttctcatagcaacggaaccacagcccgtggagcccttgaccctaccgcgttgcgccctgtcctcacccaaacctcgccgtctccgccgcacgtccctctgcctgccttgctgtgcggtcgccgcagccgcggccgcggccgctgcgccttcgccctgcaggcacgtcgcacccgtgccgctcgcctcccacgtcgcgacccccaccgcccgcaacattggccgcacgggcgaggccgtcacgtacggtggccgcacgcccgactgccacacgaccgcgcttccgcgggcaggggttccgccggccgccgcagggaaggccgcgggagcaaccacctccgtccccggcggcgccactgacaccgtttggcctccacggcgacgtaagctgccactttccctctcttgcgtttcaatctcagcatactacatgggatgctgctttgtcttcaatggcctctgaaccccttcgtctttgagcaccctgaggcccccctctgatgtttccttcgctcatggtggtctgtgcccttcaagtgctcgatgaaatgctccaagggctctgcttcctgagtttgcatcggtttggtaccttgatcattcagctatctgtggagtagtttcttgaggtgcggccaaatgctccaacatgacaatgtgaacctgcttagctgccacgtagacaaaactttcatttttatgtgcttattctttgctagttgactcttttaaggcacctttgctttcatttcacttcgagggaagaccttacttttgttccagcattcgcttaaggatgaaaggaaaggataggaatagtcatatcgctcgggacttccgttggatagcgtacgttcgccattgattcctttttgaaaggaaaagaaaagttctcaaccttccctaagcaagtcgatcacaccagatcaataaagtagtcttccctatacccgagccgaggaataattctttatttttttgttggatttacattatgtcttaccctttgtcgactacaatgccctcagtttcccagatgctttactacagcatattccagaatgtaagcatgaacagacattaagtgtttttagtttaccacaaccacattgtttttttattatgacaacattctgcaatgtgatcaaatctcagtggtgccaatattcaagaacgccgacgtctaatgtgtatacgactgttttaaatgacaaaccttatgtgtcagaccttgctagcctgcgcatttgcgcaggttcttggtagttttatattaagtttagagaacaactgcacgaataaaagtaaattagttttgcaaccaccgaatactagtcataaacatcccaaaaaagtggaggcggacatccagacatcctaagatgccggcttccgaattgatgatttttggagacgagtcatcttaggacgtctgtctccataaatatttttcaaagacatacatttttttaggcctccctaagcatttatggaggtggtctcaaggtgttcacgactgtgaaaatgatatgatcctgtgtcctaaaatcatttttctagtaatgcatggcaagcatcatgttgttcctcgggggtcaacctccggtggcctaagcacccaacagtgatgagggtgtcaattgtccactgctggagccaaattcgacagtgatggggttctaacctggcagtgaatatgaaatatggtgtagtgaacgctgaaacaagagttattacaatggaggaatcaagagagagagagtggtagggggtagcactatgttgatttagggttcttggtgagatcattcgatcaggtcttggtccgacgtccccttctacaagagcccacgccttcccttatattgtgaggagggcatggggtacaaagcaaatggtcttcatctagggctttgtcttgccttgggcttcgaccttcttttttgtggccccatcgctccttctttgtcttctagccgggaccaacacaaccacaatcactccctaacacctatgttgcagcttgatgctgaccgccaggtgccgtctgtcgcagtgtggccttcctcgggtgagccttctcctgccttctttgacaggcctggctccttctgcttgaggggttgccaagtgggcttggagtccccgatggttccttgtcctagcgcgtcatgccctaggcgtgaccttgccgatgggtgactgacaacgcctcgcggctatgatacgggacaatagtgtagtgcttctgcgcctgtcagactttgagcatctgatagattatgaagctggcttgtggcttcgctcgagatgattgttgactctgagccaaggctaggacagccacgagagcagtggtttggtcgaggctccccttagacgtggaatttccgtgtctcggctgaggccacgagccccgagagcaatggtaactttgcctttctcaggctcgcccctctgacatggaagacgcacctgatgagtgtagccctcgagccctagcatacttggagagtcagccaggggttaattggactatcacgatcttaaggctgttctggacagaacttgaggcttcggacaacagtttagaaatagtagtaactgcaggtcaacttgcttgctcgaaagtcgaaacaagaagaaaatctgatgggggaataacatatttggtataagtagtttggaagtttaggtgcctccgaatgatgattaataaatttttttctagataaaaaagtttttttttggtcaatatgaaaactagaatatatgtgttctccgttgataattatagaaatattatttccttctatccagattactaatgtggccattttccatgcatctactatccagagtgacctgcaaaacaagctaaagccaatgatagaagaagccgtggcaagcctgctcaaggacgatggtgccactgccaacgcatactgcagtggcatggcgatcgctgacctgggctgttcctctggtccaaacacgctcgtgcttgtgtccatggccattgacgccgtccgccgccactgctcggagctccagcaggagccaccagagctctgcatacacctcaacgacctcccaagcaatgacttcaactcggtcatcaggagcctggccacgtacataaaaacccaagaaagctccagtcctcctgtcttggccagcatcgttcctggctcatttcacgggcggctcttcaacaagcgtagcctccatctagtctgctccaccgctagcttccactggctctcaaaggtcagtatgagaccaactggatcaagctctctgtgttacattacatttagtactccctccattccaaaattataagaggttttgacttttctagattgcgttaaccggaaaacataacattaacaggcacctgaagacctggtgaggaacggaatcccgttttacgacagggacgaggtggtgaggcgtgctcgacgttccatagtcatcaaggcctatgctcggcagtttaacgatgacttcacacggatcttgcatctgcgagctcaagagatggttcccggaggtcggatggttttctcccttcttggacaccgttctgatgataagccggagagtgccattctgcttttggaattcacaaatgccatcctacacgaaatggcgtcaaaggtactgtatatgtcaaccatcacgtacgcatatgcagttactagatattatataattatataatatttggctgtgattattattaacagggtttgatcgataatgagaaacttgactctttctacataccaatatacgggccgtcagagaaggaggtgcgagagataatagaagctgagggttcattttcaatcgacaagatggctgtccatgaatctcttgatggcattgacgcgccgaagacagcggcgcgcgctctgagagctgtaatggaggcgatcatagcgcagcatttcgggccatctgcagatgctatggacgagttcttaaagatcacggagaagttcatcgagatggcgcctctagatgcgttctctccaaacaaatccagcgctttcgttgctgcgtccctcaccaggaggacatgatggacgcaacgtgtgtttcatatatgtatgtttggcaaatcacaagatttacatgcgtgtaataataaactataacaatgatatgttttgtggaacaatttttaattataatatccggtggtgatcgacttagcttacgtgctaagtgatatgtttgaatgtttccatgtagtaattacttagcttacgtactcaagttaaatccgaaagcatgcgatttgctaagaagtttatatttcacttgagtgcatatgttgagagttacatggaaaaagaattgatttttggtggatgttttttatttttagatttagaatacattttggagctaaatagtttaactgaaagtcaaatataatactatgtggagaattttatttaaaaaactataaagcctatgatgctaaacacaaccaaaatggatcatgcttagtttttagcatttataaataaaaagtatattttaaagacgcgtgggttcttcattttagataaaaaaaagcagcataaaagctttgaatgttttctcgaggagaatgactttcatgtattctgaaacgattttcattaaaaaaataataaaatcatttttcctgtggataatttttgtaaaattcatttacccagtggatgatttgaaaaaatagttccactaggaaatgacattgtttttttcctgaa

SEQ ID NO: 5013 - DNA, 6621 bp, Sorghum bicolor
tccgcgtcgccgtcccccggcggcgcgaggtggtcgagcagcgccgagccggggcagtcggtgtcgacgtcggccgcggacagaccggactccgcgaggacgacgggcacggcggcagcgccgaccacaacgtggccgtcgcggacgcggaggcggcccgcgagcgccgggaagagaccgagcgcggcctcgaacgcgggcgggaggaccgcgtgggggtcgatggacggcgggggaggtgggaagaagcggagcgtgcggaaggtgacgtggagcgcgttgcggtcggcgtcgaggccggagagcgggagggccgccgcgtgctgcgccggggcgggtggcggcgacaggcgcacggtgtccagaattcgtagtcgcagctgctgtggctccatgggattgggaggagcgcgcgtgagccgccgttcgagctggagagcaactgcgtcagtggctcagtgcagcgagacacagactgacgagtgctgtattgttcggcggccgtgtgagagttggattgtgcgccgcggcgacgaagacgacaacgagcagcaggagctgtcgatgtttaaagctgtcaaaacatggaggaagtaggtgcggcatggcggattggcaagagctccggcgaggggttggtggaatgttttgcggtttcaagggagaagcgacgtgggagcacaagcgccagtagtccaacagcactggcggccctcaagcaattcgaccatgcgttcgctgtctcctcggtctcgttacagcgtcgaaggaaaaaaaagagtaaggatggagacggtgctatgtatatgctgtttttctctagtgtaattaaatgagttaagtaaaaaaaaataaaaaaaatgtctaacaaaaaggaaaaaattagctatttggttcattaaattacattagagaagagctctttttgatggaagaaggatgttcttaagtggtttaattcattcaagggcatggcctcagtcacaactgatgatggctcatgcagcctgtctcttctgattagatgtttggcatggcatggtacatattgaccagaattgttctcatttgttaggcacacgttggtacagcagttcctagctaccgaagataagtctgttttttcccccgtgtccctctttcagttgaagcccatgataagtaccagttgttgatcactgagttagaaggaatccatcctagtcacagtaaagacacatggggttatatctggggattcaatgctcacacttgttgggttctatcacagtgtcacctgcttacaattggctctagcattcgagttgtctgccaaagagaaaggtcttttggttagcaatcaaggaccatgggagcttttgaaaaggaagaatatgaaattacccagctatagttgtgtgctgtcatcaggatatagaggaatctctacatcatctattcctagattgtccttttgccgtgtcgtgttggaatatgcttgggttagcacattttattcgaggcaatttgctaaatacaattctttagttcaaaaatcaaattcacatgtctttctttatggagataattgtggcaatgttttatcctatttggtctgctcgtaatgaagtcatcttcaagaatcagcatcaatctctgtaatcttgcaaaatagtttttaaacaggagctagctcaagttaagcttagagctaagagagatctaagtcttcgttacaattatggcaattctgtataattttctttattttttctatgttttttagctgtatcaagcaggctttgttttttaaaagtttaattaagttcagcagcgggcaacccctctccctaaaagaaaaactgtttgccgtggcgtgatctgagccgtccagtcacccaatcgagcggtcgcgatcgaagagcgaggtgttagcaaacggaaaccgaaacaacggctccccatcgcaaacgctctccctccactcgtcccgtcgtccgctccggccgcgccccacgccgatgccgcccccgccgccgctccacctccgcctccgtctctccctcgtcccgccccaccctatctctccttctctccgccatgcctcccgctcaccctccatcgcgtcctgccctctcgcggtgcgccccttcgcccaacgccgcggtgggcgcccgctctgcgccgtgcggggcggggccgaggccgaggcggagggcttcgcgtggccggatgggtccgaggaggaggagctgcggcggctcctggagctgctccctagggaactgaggcggcgggtggagacccacccggagctccctgcgctcgtggaggtggtcatggacctcggccggcccccgctcgcgcgcttcccgtcaggagacttcctcctctcccaccgccccatctcctttgacgacctccgacatgccacctcccaggtccagcccaaagccccaaaccaagcgtggcgagttaatttgctttagagtgacaatgagctttgtgctaggttggggactttggagcggataatcgtgctggaatcagccggacgctgcaccggatcagcgcgattaggaaccggaagggcgtcattgtaggcctcacttgccgtgtcgggcgtgcagtgcccgggagcgctaatttgcttcaggacttggttaaggatggtggctcgttgctgctcatcggcccacctggggtggggaagactactgtcataaggtaggattgggctgacaaactggatttcgatgctgattgagtagttgcgcgattgagaaatgtacaccagcaacgatcacagatgttttatgtgacagagtaccagactaccagtatctgcccattttagcatcatgtttttgtcttgtcatgcagagaaattgcccgtatgttagctgatgactataagaagcgggtgatgattgtcgacacatctaatgagattggtggggatggtgatattcctcacccaggaataggcaatgcacgtaggttgcaagtgcctaaccaagacatgcagcataaggtctgtctgctttgtccatatggagtataaataatacagtaggcctataattagtattgttcttagctgtgcttccagtcaagtaagttatatattccgtattgtatgtgccatagtgtaactcaaaagtcactggaccaatttatttgtgcattagacactggcgtactttttagttcaaaacttggtgtgtgtgctgattcgtttattcaatatcaatcaggtactgatagaagctgtggaaaaccatatgcctcaggcaattgttattgatgaaattggaacgaaactagaggccatggctgcaagcaccattgcacagaggggcatacagcttgttgcaactgcccatggtgtaacgatagagaatctgatcatgaacccctcactagagatgcttgtgggaggaatacaggtaaggatattctgcatcatcctatttcccaaaatattgtctttgggaaaatgacatagtgtacctctataacttcattacctgactcgattattgacttggaaatctttcagaaatccattcagagatatagtttgctgtttcctggctcttgcagcttgaaatgtagcacatcgaattattcaatcaacacattgcctgtaacaattccatgatccaatataagagatgaacacatggcaagattgttattaatgggtgtatcactgctttcttgatgacaagaaagttttcagaaatagttgctgactagaaatggaataggtaaaaaatattgagagaaaattgactttattcgtaaactaagttgtgtgccttgtgtactcatcattgatcatgacataggccatgtacggatttatctgtactgtgtctgagtacatgtgacttttcagttcttaaagtctgcttgctgaagtttttttctatgcttcccaaaggaagacttcatatagagaaaaaaaactgtcaaatggttgagtgcaacctagcaactaattgttatagcctaagtgtagctttcttctcagaaagcacagaagcaccttatgtgcagtttttgtgttactctttactttttggtcaaaaggaaaaacgaagatttctaatcatgccctttcttatctaaaagagtgtcacacttggtgatgaagaagctaaccggagaggagttcaaaaaactgtcctagagcgcaagggcccatcaacatttacatgtgctgcagagatcgtctcgaaaaaagaattacgtgtccatcgtagtctggaagccacagtagatgctctactcgcaggttctcaccgatttctctattacttagctgcattgtcatgttaaatttaatgctgttttttatgatattgaacatggaaatgtgtagatctgatgtcacaatgattcatcttgcacttttgttggtgcaggcaagctgcctaatgttgaaattcggaagttgggttcaaagggattgatgcaggaagtttctgtgcaaaaggaacgatcacatcttggtatctctgatgcaactgaatttgaccgtgactctctaaggaatgccagaagaagcttggactctgcatttaatcttgactctgctgaagggcatatagagaggacagacggagatggttcaagcttgaatctatatgcatatggggtacggatgtcttcatagctcattcttttgatccctagttttctgagcagtgcgcccctttacatcagtatgtagttctctgcacagcgattttgtatactgagtgtggcaaagtgctacccactccccccttactatagttgcatcatttgatatgaactattagggtatggtaggtatgttggttatataaaaccgaactattaaggtacggtaggtatctaccactcaaaagtatgcttatctggtcagttacttcaaggcctgaatgatattgatctttgctgtttgttatgtgtagtagcactattagggtaaggtaggtatgttccactgaaaaggatgctgaactggtgagttgcccataagcctctatgaaatttaatcatccctgaaccctgataatttttttttctggagtggtgcgggaagccaagttgtcttgtgacttacttaatctgcacgcctacatttaaaatttgtgattccttttatttgggtgcacagattgcaatacctaattcagtaacttactataatctgtatgcctatgtttgtttggataactgctcctgtcactgcaacaatagtggttataccatttggtcgctgagttttgttctaaagttcttttgttaaattttccgaacttagtttgtaacttattggataggctgttctagatctccgagtcgactgccttgcaagccattcaacagctggagttggaggacattgttactttaacttataatatcagtgaagctgatgcagtgatcgcgttacattcaaagctcaagaagaattctcagattcaggctttggtgaaatctcaagatataccggttttcttcgtgaaggtttgccttgcacagttgccatttacaggacacttttaatattcatgttccaggaattcttattcagtatattggttctctgttcttcacagacaaactccctgtctcaaatcactcgggcacttcgtgctcttgttgacgatcacatggacgagctgatagactacgatgataaggaagaagcaagatctcccgaggaaactgatgctctggaggtacgctatcatctctgcacatctaaactcctttttcggcggccgtaacatcgttactcgtcctgaacaaaagtatccaatggttgttccccgatgtttaggaggcaaggctggcaatcgagcaagtagtgatcccgaaaggcgagagcgtgcagctactgccgaggccatcaagcatcatctcatcccaagtggatctcgtcgaaagcttcagcctccagtgggaggtcataggccaggagcctcacgcgtacgtgacgatccttccgcacttcgcgccaaaagaagctgaagctatccagaaagaaaccccagcggcggggctcgccgattcagagagctccgatgacttggatcatgcccagaatggcatcaccaggctacctttcctacccgattaggcgcctggcgtatcctttcagttcttcgtgcccctgccgttgtacctgcatgtatatattccatttatttactatcttggtagtaacttttaccaggaagcacctgcgaggttgcgtctacgaaagtggatatagtgctcttctatgcatacggtatctatgctctgttgtggactacagtcatattcatggatgtctgtttcaccttttttacatgctctgccaattcccaaagtacatatccgttgtaatctaccgaacaagataagcaagcataatccgatctttttttttaaacgaacccgcagaagaactcactgaaatattaaaaaaaaaagatgacagacaatgtacaacctcagacaaaagattctatacgtcactaagctacaaaagtaaaacgcctcccaagggagacggatcaaaacttggaaaatggccgctcgatgaacgtagaaaggtgttttgcctgccatgatccacaatgatgcctcgtcttt

SEQ ID NO: 5014 - DNA, 11844 bp, Sorghum bicolor
tcttgtaaattacagacaaactatgcaattagtttttgttttcgtctatatttagtgctccatgcatatgttataagatttgatgtgatggaaaattttgatttttttttgatttttggggtgaactaaggctttgtttagttggggagtgaaaagtttttgggtatcactttgcatgtttcataagatgttggaagaggtatttggatagtaataaaaaaataaattacataactcgtctggaaactgcgagatgaatttattaaacctaattaatcagtcattagcacatgtgaatactgtagtagcgaattaggcttaaaaattcgtcttgcgatttacaatcaaactgtgtaattagtttttgttttcgtatatatttaatgctctatgcatgtgtcaaaaaatcgatgtgatgaatgaaaaatttttataggtgggaaactaaacgaggcctccagatcgacaagttacccgcctgccatggggctccgggatgttcgccccaaaccattttcctgtgcttctccccttgtggatagaaggaaactatattccggtctcacggttgttgatgcgtggacacagcttcctccattccttgttagggatttgtatttttgacaacgtagtcatagtttttgctgaggagcgggcctgatgcgcaatggcggagtgcaaactcacggtatgtttccatgactagtgttgggctagcttaattagcgtcgtagacagattgattagcgccaaggtactcacgatttacatgcttctttttgtggtaatacaaaagctagtgaggccttgtttagttcacccaaaaaactaaaaacttttcaaaattatccgtcacatcaaatcttacggtacatgcatgaaatattaaatataaatgaaaacaaaaactaattacatagtttgtctgtaaatcgcgagatgaatcttttaatcctagttactctgtaattggacaatgtttgtcaaataaaaatgaaagtgctacaatattaaaatataaaactttttgatctaaataaggcctaaaaaccattcacggaatcacacgtcactttcgtcggataggagtgtatgacaagatcacgtaggacacgcggtttgaccaagtgaggggtgagccagggtttttaacgtgggcgtttaacgtggccatgcgggatagcgctcgttttttaacgtgtggatcggatgcggtgcgatatgacgatacacttagttgtttttaggtacataaatgtatttggtactattattctatataaaatcatgtcaaaattttgtttttgaacctgctattatatgtctatgttatcatcaatttgatttttttttataaacaacgaaactaaaccaaaaatactgaaatgaaatttctttattatcgtttgttttgaaaggaactgatcaatacttattttttgagaaaccgaatttatgtggaaccgaagtaacaaaccggagcatgcagtaatgccaaatgccgagaccataaaataaaaagacgagcacactgttttttcctaccataaaataaaagacgagcaatttcctaccattctaccataaataaaataagaacctaataaacgctcacgctcacgctgaccaacgccatacccgccgcggcgcaccgtttgttatccgacgcagccacgcgcgttcccttttagcaccacgttcccacgaggaatctcccagctcccactgccatccggtcccacgagatatcgaccccactactcagtgactctagatacgatcaaatctagttatatcgccccccccccggcagctggcgccacgaggttgacgacaggtatccggtaggcaggcagccagcccgcagaccgccccacagggccacaaggtcacgagccgctcattttttcaaaacaaaaacgcctcctctcttccgcagcccgcaggccgcagccccgcttcacctctatccctcccctcttctctcctctcccccaccaaatcctcgttcatttttttctttaatccaagcgacttcgcgtgtgagagcgggagagcgcgcgaggctagggtttccgcgggcgatggaagcagcggcggcggcgccgccggcagtggcgtcgtccgcatctgcatcggcttccgcgggccggtcgcgcccatctaccagcgctgcccaggttcgtctctccccctcctgcggtgctgaggttccgcgtgcgccggtcggcgtgtcgttcgcgtcttgggtcgagggggcaatgctgattggatttggtggccgatgcggcggcgatcggtcggtttggagtaattcgagcagagatctggcggcgtttgcgggggtgtcgagttgcgggcgccggatttcgatgccgagctttagctgactgctctgtttgtgctgctgcgcgtgtgctctcctttagcgaggtttctgtctttgtggcggcggtaggtggggttgccgcggtgtttttttcttttcttttctggagacgacttggtttcgtttcaggttgttttcagagaccggatagtggactggtcaacagtagactgcattccataaaaaggttgatggaatcagaataactactgtactttcagcttggagctggattccgcatttttttttctgtgaggctgtatcgtttttttccagtgacttgtatattgaatccagggaatgtagcttggcaagctacatccctgcttcggattgttttggttctgaactccgaagagctggcctatattttatggacttgttccatttttcacatagaagggaattctgggggtgcaaccatcatataccgtgtggtgataacacagtcagcacaataaggaacactacaataaaagttgttgtcatgttcttaaacggtattcagttctctatggtagtatcttactcatagcagaatgcggaactaagtaatttttgcacaacatttcatgtaaacagtgtgctcacataagatgatgtgaatgcggatacagctgaccttatacaagaatgaagttagttatatttaactgttatatgtaaacctttggtctggaatcagaaaattcttggactcaaggagtatattttaaatgtcattctctaagttttgttcatctggtgaatgaatcaaatcaatatgatataactcagggattttatgtatgtgttcccttaaaatatttgttttctatgcagtgcatttgtttttttccctagtctaattcgtgtctttcttgtgcaaaacggttaagaattatgttagaattgagtatccatttttctgttctgatttatttttattaagaatgttggagctgtatacatagagaaccatttgttgggttctgatagtgatattgattttgatccagagctgtttgccatttaatcatattagctggcatgtgggtttgtactatgcctgctgtgatttattttactgcttctgcttttcttaggacaccactattacggctgtgcaagctggagaagaaaatgctgcctccccctatgttttatctgttattgactcgttaaaaaagaggattacagcagatcgtttgacttacattaaggtgccttgaacttacatattctgtcctttttcagaatatttgtaccccatatttatgctgctaattttcttcttttcatcccttgccagaataggataggggagaataagattaatctcagcagctatacacagaggacttacaatttatcaaaaaataggcaaattaatacatcaaagggtactgatttggcatcaaatttgctcacaaaaaggcaagatgatgcgctatgcaccctgcatagttatgatattactccggttgacaaagatggtggcaattttcaagatgaaaatcctttctcctcatcaaatgttatttttggtggaaatcttggtcccaagaatgctattagaccaattaaattaccagaagtgccaaagctcccaccttatacaacatggatatttttggacaggtcagtttataatcataggcttttcttggcatcccaaaccctgcatacactatctaggtactgacaatagaatgtgtcatatacatgttagaacacatttagcacatgcaagatttggtgttcaatctttatttcgattttcctagtgaccctttggtaccattttttttaattgccaaacctgtccctttgctaattgtattttattacaagaaatgtggtggaagcatattttgcactaatgtttcatatggttcatttctaaaacttgtcagttttaaccaagtttatagtaaaatgcaccaacatcaaatagtttctatgaactggaaaagcttggttgaagttagagaaaaacttgtctagtgcatttatttggtactgtagatgataatgtatttttctatgaacttggttaaagttagagaagtttgatttgggacaaaactaaaaggacctacttttgaggacaaagggattagtatgttacagtattttaaactgatcttgttgtgttgtattgttgccagattatgaaaatgtaatatttaacagtagtatgatattgggatatttatgaaatagtgtgctacaatatttgatggtagacggtagtatactaagtgctaaaatagttgtcccttggctgaaaaataaatgcaaacatgtatgcaagaggcatcagttcgttttgtggtatttcacaagattaaggtctcttgagatgtaagggtttcctggggtttcattcaggaaccagaggatgacagaagaccaatctgtacttggtcgacggaggatttactacgataccagttgtggtgaagctctaatttgcagtgacagtgaagatgaagccattgaggatgaggaggaaaaaaaggaatttaaacattctgaagatcgcattattcggtatggaagcctgtgttatttttcttttgcattggcgtggatggtgtttgagttatgcactaatttgtgattgatggatgtgatgatttttacaaatacaatttgttgaaggaatacagttgcactcaactttctttaatggaaaagttacatatttctttttgagttggaataggttacatacactgctgctatatcattgaaatatgataagttgtaaatcatcagaaaacattatgtgcttgttcaaaagtatgatgcctccaagctatcatgtggagtttgaactcaattacacatttgtagccagtggcggacccaggatttgctcatgactagggcctctacgtagcagtgaaagcgattatacatttcatttttttacacaaaagtttttaaaaaggttaatacttgtttttgtttcttttctatcgttctggttacttctcagggcgcaggaaataaataaactgaaatacccaaggagaagaagaaaaaactattaaaggaggcaaacatgaagtgtagggtgaactaatgtcgctaactgcaacatatacttctagcttcaagattatgggctctaaaaggctctagaattacgtgtcataatcatatcaaggattatgttattttcttaaatattttctgttgtagtttgtgcatggtgtttatggttgatatattgattctgatgttaggctatattttggctgcagactttgttctattgtataaaatatattaattaaatattaaatttatgtcttcacttgtaggatagatcatcgattatgaactgttgtgtctgcttgtttccacttgatcagttatatcatctaatagcctgctcttttgtactttgttaggatgacaattcaagaatgtggcatgtctgatgctgtactgcaaacactagctcgatacatggagcgggctactgatgacataaaggctagtttctcttttgtttccatatgactcattaaaggcgtgtatgagaaaggtgccctttttccatttcatctacgagatctgacgtataaaatgacatccttttttacaggccaggtatgaaatcctgcatggtgagaaaactaaggattcttgcaagaaaggaactgagcataatgccaaagtggaagatttgtaccgtgacaaagatttggatgcagcattggattcctttgacaatctgttttgtcgacgatgtctagtacgtctgactcttaactttcagatattcatttctaggaccagtgtgctgacagacatttctgctcattggtgatgctgataggtgtttgattgcaagctacacggctgttctcaagatttagtatttcctgtaagttttcacaagttgaaagagttatttctaaaactgtgtatttacttgatttgggtcttctttgtacagacagaaaaacagacagcttggagtggtgttgatgatggtgtaccctgtggtattcattgctataaactggttcgtattttgttgtgaatgacatcaaatagctgtttttgtggtgtgacaatttagccttctgaagttctgaactttgaagcataagctcatgattttgctttggtacttgttttgttaacaacatttttgcaggcctctgaaccagattctgtagctggagttgatcacatgcttattgatgttgaggagcccgctcgctcatcagacaatgtgatgaaccagccaggcccaaataagaaaaagaacggctccagtggaaggaaggctaaatctcaacaaagtgaaagctcttcaactgcaagggttatctcagaaagcagtgactcagaagtacatccaataagcaataaatctccacaacactcccctagtccctcaaaagttaaaattgggccgaaaggtggaatcagaaagattaccaatagacgaatcgccaagagaattcttatgagtgtgaagaaaggacaaagggaaatggcatcatctgattctaattctgttagtggatcctctttggcaagggacatgaagcttagatctgatacacgaaatggaaataaggaattaattgtatcctcacaacagaattctccaagcacaagaagttccaaaaggaagagtacacctcaaattgggaataactcggtttctgctgaagtttataatgattcaacagaggaagcaaataaccgtcattcagcaactgatggttatgatagttcaaggaaagaagaatttgtcgatgagaatatatgcaagcaggagggttacttgagatcctggaatgcaattgagcagggacttctggtgaaaggattagagatttttggaaggaacaggttgggtctttctcctaatatcaaactccagatagctcatagtgatctgaatggtgttccttgtgcattgaacttaggaattttgtttcccttagtctccaaatttcttgaaattcatcttctgtttaccttgtgagatcacataaacatattggagatctttctactgtaattgtaaaaaagcaatttaatcttggtttagctaatctcaatagttacactgaacccatggtttgcctttcacacagttgtttaattgctcggaaccttcttggtggaatgaagacgtgcagagatgtttttcagtatatgaattatattgaaaacagcagtgcatctggagctcttagtggtgttgattctcttgttaaaggatatattaaggttggattcactgtgacccttatttgttgatacttatagtcaagccggtaacttaatttggtgttgtccatgtcgatgtcccagggtactgagttgcgcacaaggtcaaggtattttagaaggcgaggtaaagtccgtcgtttgaagtacacctggaaatctgcaggttaccatttcataaggaagaggattactgaaaggaaggatcagccttgtcgacaatataatccatgtggttgtcaatctgcatgtggaaagcagtgtccatgtcttacaaatgggacatgctgtgagaaatactgcgggtgagttgtgttttcctttgcatcagcttattagcatgcataaatttggttgtcaatctgcatgtggaatgcagtgtccatgtcttacaaatgggacatgctgtgagaaatactgttggtgagatgcctgttttcctttgcatcagtttattagtatgcatatttttttatgtacagcttattctttatacattttgtatctcattttgaataactaatacattttttttctgctctaaagaggggcggtggagacctaagggtcactaattgacaaccctatgcagcattatctatcataattttacctacgttttgctgatatcagaaatgttttatccgttctgccagatacttgccctttgtttagaatacaaatttttctatgttagtcttgttgcaggcagactctaatcaggaatggttgcccttctggttattattaaaggtgttggtcaggggaaaaattatagtatagacagttagagattcactttggttttctatgctgttgcaacgctgtggtaaatgaaaatcaattcttttctgatgctgctctttgagttgctgtcttgtcgtggcccttttaatctaagaaacatttgtattcaaatatattgtggcaatgtttggattgttgcttgaaccataccatctagaaacatttgtattcaaagatattgtggtgatgttagaccatgccgaagtgtgcctgtttagattgatgccaatctttggcttgccaacactcacgctggttcacacagttagttcacataatctttggcctgcgtaatcctgtgctatttgtttggctacccctgttggcagggcagacacacaggtgttatccaaacaatccattttgctgactgtttcttagtttaagcattttttgttcttgattgggaaggaaattagtatgtggcaacatttcactaccatcctgctgttgtaattttgtgattcattacgttctttttgtgaaagcttatcccttcccttatgcattcaggtgtccaaaaatttgcaagaaccgttttcgaggatgtcactgtgcaaagagccagtgtcgcagccgccaatgtccatgttttgctgctgacagggaatgtgatccggatgtttgcagaaactgctgggttgggtatgtattttaaaatctgagtcatggccatcatttacagtgacacctccaaattatgtgttctccaatcacaccctggtcgtttaccacacctcttttttttttttaaaaaaatatatatgttccttatatttcaccaccagaggttgagactagttgcatgaagccatgaaaactgtagttaaatactgaactaaatgttaatttgtgtctttgcagtttttaactgggctgaaacatgcctagtttcccatttaacagctatgaactctggggttacatattacacaatactaggctgtatgtaattctgttgggttatatccaatttatacaagatgatttacaaaatgtaggctttagtatcagcgttctgctgacatgtataggcaattgtctcatttaatttgaactaggctttacgacttcaggaattttcctaatttaagttttctatatgtgtcaaccaaaaaattgaagattttttcaattttttcatgatatgcagttgagtagaaggcaaagaaagattgaacaaatttatcattatcaataactagttataaaaaagtttgttcaaatggttcctcattagtcattagagctgatttaaatccataattcttttctagaataaatcatcagtacactgaactacagttcacttatattttccaacttacaggtgtggtgatggtacattaggagttccaaaccagagaggagataattatgaatgccggaacatgaaactgcttcttaaacaacagcaaagggtaattgataatatacccatgctattggcatgttgcttataatcccgtgaagatgataattgatttatctatatccatttttcaagaaaaaagaactacaaattcttttacaggagattctcaagtctagctttcattaaactgtatctggtacttgttattgtgatatgcaagtgatttgagtgcaaaggtctaaaatccatctgagtttatgaatgaatgagatggattttagaatgtgctctttttgtggtgcactgaggcaacatatcttgtggtgcactgaggcaacatgtcccagtaacatattcttacattttaatgtgctctttttgaaaaaaaaattcatcaaaggtctttacttagtcatgactcatgatattcttaggtcttacttggaagatcagatgtctctggctggggagcattcctcaaggtaaaattattcatctgttcttttccgttcgtacttctctttatgatgtcttatctgtcttttcttaaactttcagaatagtgttaccaaacatgaatatcttggtgagtacactggggaactaatctcacacaaagaagctgataagcgtggaaagatatatgatcgtgagaactcatcattccttttcaacctgaacaatgaggtaggtgtgcaagattatcctctgcaagcattcagttattatacttggctgaccacctgatgggaccagcactgtattgtgcctttatgttaactgaatttttcaactgctctgctttgtccactgtctgccacatgctgacctgtactgtttgaatgcagtatgttcttgatgcatacagaatgggtgacaagctgaaatttgccaaccatgcccctgacccgaattgctatgccaaggttatcatggtagctggtgatcatagagtgggcatattcgccaaagaaagaatcctcgctggcgaagagttattctatgattaccgctatgagcccgacagagctcctgcttgggcccggaagcctgaggcttcgggagcaaaggatgatgggcaaccgtccaatgggcgtgcaaagaagctcgcccaaaacacaagaggctgaatctgattctgattctttcattgctgggccacaaatttggcagccattcaaccaagaacctgtcattcataggacccaatttatttaaacttgtcactgtaactcgaatgttttatttgcttgaattctccatggcagctggtcctgccatctgtagaattagctggcgggcgactgatctgatgtaacatgagctgctgataggtagcgtgtgcccctttagagcctgattcatgtgggggcacggtcagagcgtttctgaggcaactagggctgtttttgttgccgcaaaagtagcatgttaagctgctttagtgcaatttatcggctagttgtacaaggagaattgcattaaattaggcatacttggagtacaaaatgccgtctatattctgtacttttacccaaaagaaattatgccatcagttgatctgtctggaacttcttttcaccgtgcgaaactcacccacagtgagtgagaatggagtctgatttctagtaccgtggcttaggcttcgcaccacgcggtcgtagatcctctatgcagaaaatgatgtgcagtagtattatattatacttgacttatcttcactataattgaaaactttttgggccgttagaccagacaaactcacccctcaacaaactcacctctcaacacctcacgccgcagtctctccaagtcaatcacgattcatctcaaaattgaatccatttgaatccaccccgcctgccgttcatttgaatccaccccgtctgctgccacaatctacacctcccttcctcttccagtgcagcggcgatctatgtacaagtagagcacgtacaagcaagacactgccaagagcacgtacgtgacgcccgcgccgccgtctacttctgccctccacaac

SEQ ID NO: 5015 - DNA, 6187 bp, Sorghum bicolor
ccagcagccaggccgaattaggtggctaggggcgggccttgattgttggcccagttatttttatataagtttagttatccttttaagttgcaatttatattagtcccaaataggctatttagcataaggaggcatagttaaagggacataaatatctgtagacacttttgatataagcaagcaagaattattatctacaatctcctttctcttctaaaaacctaagcctgcggctgaggggcaaaacctcgccggagaagacggatcgcggctacgaactacgtagccgaggtccagctaccgtagggcttgacgcccttgacagtttaaatataatccaaagaaaatattgaggacgctagataagagggacagaagacatgccaaattatttcacctgtcgatgaaggttattcagttcaacatcatcaccatccacaatgcccaagcaacctaataagataacaagctgtaaggaatgatagattagtgaatacaacaaattagtgaactggagcccatcaataaattcactttacacatataagatatgtaaaatctgtcttatcattaaagaaatataatttcttccttgagaaacgaacataaaacacaacttcacagcagagtatgaggcagctgttgagaaggaaaaaacatggatcttcctagctataaccgtgtcctttggaacaatcagattgaagaatctttgcagcatttgttcattctctgtccgtttgcttctgccttttgtaacctagttaatgtgcagacaagctcagacctggacccttttgaatgtcttgatcagttcaatcagcaactgaacatgcccttctttatggaaattatcatcattatgtgctggagcatatataaggcaagacatgatctaattttccaaggaatccaactgtctgttttggcttccaagagctttaaatcagaattttctctgttcaccatgagggcaaagcataactacttccctctaatcgatacatggatagaaaacttagtttaattcggttaactttcttagtttctttgtttcttaagcttgtttgtacttcacttcggttaactctttacttttcaatttaaaatatgtattgcggtgggcctcctgattccctgaagaaaaaactaaacagcagagaggaaaattaccgacaccgcaagctgctagatacaacgccacgggagagcccaaacctccagccccaaccactaaaatcgacgactgtgacagcttccgctggcctgccagatagtagatgacaaagggtcagaggatcagccggacgatgttgctacactgcaccttttttcccaacaatatactgcaattatgaattgtgatgacacatcggaagcagaagaggcaagcgttattaagtatagtaaacaagagaagggggcagtccttggatcaaccaggaagccatattaatggaagcaagtctgagactttggaggtggcaagccgtgctgattgaaacgaaacaaaacaactgaccttcgaccccgaagtccgggagaaggaggtggcggctataccggtagaccatatccgctgggagaccaccatccagcttaaacccgttactcacgcggctctggcacgcgacactcccgccgcacgcaccatcctctactcctatccccgccgccgcaccgctgactcccgcaggcgtcgcctcgagctgcgattccagcagccgtatccggccgtcgaggtcctcccgctccgcccgaagcttctttagctcccgctctatcgcctccctcctgccaccgccgccgccgccgccgcccatccctcgcccactgctgccgtgtcgcctcaaccgccgaaattgtgtcgtcagtcgccgcagccgccgaaattaaccaaccgcgcgggcccacgtaaacaaatacgtaaaagttcggcccacgtagatgtgtactaaaggccggcccagtaagagaccacttgcgttaagaggtgaggtggtaatagcgcgttttgcccgtcggattcggtcgggactcgcggggtctcggctcgtttgcccgcagccccttggccccgttccctcagcatctcgtcggcggcggagaggaggaggggatggcgcaccggctgctgcgggacgcgcaggcggacgggtgggagcggtcggacttccccatcatctgcgagtcatgcctaggcgacaacccctacgtccggatggtagcacatcaaacccgaaccctacctgaatgatttgtttgcttctctttggcgtcgttatgcgatttgcagggcggtggtccgcttgattttgttctcgtttgtgatttcttatgctcgacgggatccgggcctaggtcacgcttgtgtttaggtgtagaattttgtgcacgtgtttaggggccgtttggttcgtttggttctcctcacctcaccttccttagccaggaaatggaaggctggggaaaatattgctcttactgttgatggttctgcaagatcagtagtgcagtacggtggttttgccatgtgctgtaattaacaagatgagaaatatattttagccagttatactagctagcaaaaccagggtaaattagtttgctagcaaattggttttgccatatgccatacacatcaatgtactaggtaggtgttacacattaattggaataacttttcgattaatctctccttattttgcatttgcttcagggtttcatgcaaatacgattttatggcttagtggctcttgtttttctttgcagttaagagctgaatatgacaaagagtgcaaaatttgtgcacgcccctttactgtcttccggtggcggcctggtcgagatgcaaggtacaagaagactgagatctgccagacatgttgcaagctaaagaatgtctgccaggtctgcctgctggatcttgaatatggactgcctgttcaggtccgggatacagcactcgctatcaattctaatgatgcgattccaaggagtgatgtcaatcgtgaatattttgcagaagagcacgataggagggtacgtttctctttcaatattgaatcttgctgctgttgttaaatgttaatttctttcatattaccaaaaatctaagacaaactgtgtattcttcaggttgttttgttcaattgaaatctgaaatgaagataccatgataataatactgttgtttccatgatgccatcgtaaactgtatcatagtgccgtatacacttgaagtatggcagcaacaaaagatgccttctttttagatgtaatttatcttcatctgctatgtttgcaatgaattgcacttattctctgcttatatgcacttattcttgtttgttccatttgacctaataatacttgttcctaatgagagtttatggttcataaatgtaggccagagctggcatagactatgattcttcctatgggaaggctcgtccaaatgataccattctgaagcttcagaggacagcaccatattacaagaggaacagagctcatgtttgtagtttctttgtgcgtggtgaatgtacaagaggagctgagtgcccttatcgtcatgagatgcctgaaactggggagttatctcagcagaacattaaagatcgctactatgggtatgttgctgtgcttatgcactcattatttttacttgtgtttttttttgtggttctctgtatgtattgtaggcttcatttcagcaatcactattattgattggcatgtgcaatttaaaactggcattcataatttcatcatatgaaataatgaatcagatagccttatgttcttgactctgcttgtcaacattgcagtgtctaaaggatttgatactttacattcaacacttttgtgtcgcatcagtagaacactatgttgccattcctgtgttcatgtagtccatctagttctttctggagcatatagcaaaaacctattaagcaatgcttttcctttatgacttggattttagacaacatatttgaagattcttattaccttctattttgtttcttgtctttttttttttactggcttgggactaaaaggctatgctgctgttgttgattttaaggtggtaagacaaaaaaaagtctttctagttagtggcaattgatattaacatctgtacagttaacccacatctgggtagaaattgtattgcttacatgtataaatgttttttttagataaaaggcttacatgtacagatgtacagacaaaagatgtctccggatactgtttggtcatgaaactatcctaacttggttgaaatgttgaacttgtagctgtatcttggaaacctttatcccagccaagattgcgctctagatatgccaaacattgatgttttttaggtcaacttaatgagttcaactgaatcattcgttattaaaaacctttaggtgaatgtatctattcagtttacaaatttttccatgtctattctctttgccttggtttctgactatctcttgctccctgcagagttaatgacccagttgcactgaaacttttgagcaaggcaggtgagatgccatccctgacaccgccagatgatgagactataaggaccctctacattggtggactcgatagcagaataactgaacaggatttgagggatcaattttatgcccatggtgagattgagtccataaggatggtacttcaacgtgcaatcgcgtttgtgacatatactacaagagaaggcgcagagaaggctgcagaggagcttgctaacaagctagtcatcaagggtgtgcgcctgaagctgatgtggggcaagcctcaggctccaaagcctgaggaggatgagtctgggaggcaggggcaggtttcccatggaggactgctccctagggctgtcatatctcagcagcagagcagtgaccaacctcaaccccctgggatggaggaccaacagcaacaggctgcaccagcatcgtactacttcaacattccagcaccagcagcaacggagcggactctgtacccatccatggatccacagaggatgggtgctatagtaaaatcacaggacagtgaaggcaaacctgggctgcagcaagccgggcaaggtcagccatcaagcagctcagcacagggtggctatcctgcaccaccgccatactaccatggtcagtatccaccatactatccacctcccccaccgtatggtggctacatgcctccaccgcgcatgccctacccaccacaatatccaccttaccagcctatgttagcaccaccagcacaggcacaggctagttcatctcagcaaccacctcaagcaggtgcaggacagcagccgcctcatggccctccagctcagcagcagccacaaccgcaaattcacaactgaagtccttacaagatgttggatattgctactgctctaatggctcggcaggagaatgtaaccctcgtgggtcgccagcttttgtaattttttaatttgtggttaacagtaaaactttgttgtattgcttatcaaagattgaaaaaccgggagatatactggatgtgttactgtgtctgctgtgtttcacgtggaggccatcgaagccttcatctttttcagattgacctaaagactcggttgtaattgtaaaaatgacttggatactgacattcgttcaaaagtattgatcgctgatttattattagagaaaaaacactcgttgatttattatgcgagaaaaacactgcgaagtagaaaaaaaaaagtacggcctatgagataagcaaatggagctgcaactttatggctaaattatcaatttggctgcaagatatctatctttttttgttcgtttggctaataagtcatgatataaagtattgttagctgatttattgtaagaagtagaaaaaaaaagtatggcttatgagataagcaaatgttaagctaataagcctcggctgatgtccatttgaatgaacgctggcccaactagccaaacccgacctcctttgcacggggccagtgaccgagtgcgagtgggtcagtgggggaagcgactggaggaagacgaagcgggggtagaggtccgcggcgcgccggagcggcgccgcggcatccgtggaaccatccaggcacaacagcagggtaagcgcgttccaactgccgacctctaccagtctcccatgctccatcccttggcgcctt

SEQ ID NO: 5016 - DNA, 3805 bp, Sorghum bicolor
ttattttcttgcacttctttctatttcatgtcctttgactgatctttatatgacagatactgtggttgcttatccatgaatgtattgtacatgcatatgttaagtactgaaaccaaggctgcatgttctgtgcttgtataccaaagtcactcatttgtttgctttggatgtactgaaaccaaggctgcatgttgactgctcactgctgttactaccatttacatgctattttgccttctgtctaccctttatgcatgagaatactgatttgttagttttttcccaactcctttacagaaactgaatccagtttctactctttctacgtttgatcacttaaataataaaaggaatgacaaaaatcaagtatgagcaagacagggatgaaaatgtaaggaaagttcaggaacgatttaaaacactgggtattccactattatctcaggaagttagagacattctttcaaaaaaggaaaagcgcaaagaaaagagactaatatctgacaaaccaagttctgataatgattatgatccatcatctgacattgataaccaatctgatagtgatgataactatgatgatgacctcaataatgaggtgaatgctgaggtaagatgcattacttggccaattaacaggtttctagtcccccctcttacaaacatgtactttactttagtcaattaatctacttgatgtttgtctgtttgttattaattaacaagatgcatctctctcttggcaggtagaagggatggttccaggaactcgccctcagcagaagaagcagaagggaagagcaatggcagctgccaacaagccaccatgcacgcctgtaagattcactaggcaaactgcagctatgccttcgcctggcggtcgtccaccacctaaggaaagactgtccttgcctcctaagaacaattccaaagccaacccaaagcctaaggccatgtccagtgctatccaactccaatctcagctcaatataagcggcagcaagacaacaaacacaaagcctactactaccaccagtccacccttttctgccccagttgcaaactcagtgcctagtcctactaaatacaccaggaaatctgcggccatgtcttcgcctggtgcaaacccaatgcttaatccttctacagtatacattcccagtgcagccatgtctgcacctgctccaaacattgagcatactacagctagacccactccaccgtctcagcaaccaactcccacagctagtgttaaccaagcaggtcatgcagacacctcgccaggtggactcagctctaggcaaagcaatgatataagtgacctacctgaccaattggatgctgctacttcagaaggtcatacaactgaaggagaaccagctggtgacttagttccaagtaatcaaaacgtgttttgaagcattatttcctccattcgatatttacatatgttggtactatattaacaaaatgtgcttattatttgccaatgtagcgcgttcaagggaagtccgcaagaaaaccatgggtcatggattagagaagttgataaaaagaggaaacaggctacctatccatgtggctgaagggaagaaaagaccggatgtcccactccaggcagcaaagcttgcatcagaaactggtattgcccttagagacaaacttcctatctatacatgttggaaggactataaggaagatgcagtgaaggaagaagtacaaaaagtgcttgatagagtggcggtaagatagctatttcattacaaaaactttgttgcattagtagctccactcccgtataattatttgtcactaaggattcttttgtgtggttgtagacaaggttggatgtggatgtcaagaatgatggaccaagcaaatctgcatgcactgatattatcaagaggggagtaaggcagcaaaggtatctactcaaaaggaagcactttgatccatcagtgacaaaagagtaactattggccagacaacctccagctaagatgaagagagcggagtggaaaaaaccggtagactactggtttgatccaaagagtcaggtccatgcctaaattatctctttttcttactttgaaatgaaacatatgcatgggaatgtaaactgtcttagatttgtggtgtaggaaaaatctgctaagaataaagtgaaccgtggccaagtgcgccttcaccaaaggactggatctaggagctacattgcccatcgatacagcctggtatggatgctgctactacttgctgattgccaagtgctgctgcttggctgcttgctgcttactgattgccaggtgctatactgcttggctgcttgctggtgctggttggtgatggctgctgctgcatgtctgtttgctgattgctgttgctgcttgctgctgattgccaatatggctgctggtggattgctacttggctgcatggctactgattgctaactgcatggacaaagatgagcctgctgttgtttgatcattgcattctgagttggagcttgctgcttgcaccatgcatgtgttagtgtcacggtaatagtctctgaagtatggatttgtcatgaaataatgcatacatattttgggggcttgttgttcacatgtacaaattaacccaagtttgtccacacctcactttaccttgaaggatgtcattttgaatctttttgtacatactgcagaggccgaagtacaacaatatggagccagatcctattgaattctttggggaatgtatgaatagtccacaaagtgggcgcactccgcttgcaaatgagatttatgtaagttatataatcattgcatacatgtactatactcaaattcaagccttcttgaccactattggatggccttctaattaagtggagtcattctatgtaggaacaaatggtggcagagaaggagagggatccagatgaaggagaagaacaaaggtccccctcaaagattgttgctgagagtctaagccacatcagctgttcctcaaccttccttccaaatcttggtgtcaacaaaacggtgaagactgctaggtccacgacagcagcagtagaagcacgcctacaggctgaatttgaggcaaggctgcaagctgaaagagacgaagctgaaagagacgaagctgctaggaagcaggaagagttgcaagaacagcttcgagcacaacagcagtctcttttagagaatcaaaacttgttgcgccagacacaagaagagatgaaggggatgcatagtaagtttgaagagaataatgcactgctgcgagctgtgctaaaacttcagaaggattgaggtatatatgaatgcactttctgagggtgaggcctttacctaagcttttgcttcctttgttggaacttaccttgtggttggaagttggaactttgtaagaactatgtgccatgtatgttagaactatgtggtagaagctggaactttttgttgcattagtagaactatgtggtcagacaagtgtgctagaactatgtggttggaacctggtacttatgtctaagcttgatggctcttgtgaattgtgtatgagttttatcatgtggatgatggcttcattggattgtctcctgtggatgatatctgtgtattatgataatatctgtgtattatgatgttcttggctggcagcttctgtggatgatatatatgtgtatcatgacgttctgagatgtgatgcaagatagctctgttgtcactgaataggctccaagctcgtcatgaatgaaaatataatctgtgacccctgatatctgtctcaaaaagtgcctagcaaccat

SEQ ID NO: 5017 - DNA, 5379 bp, Sorghum bicolor
  misc_feature (5362)..(5379): n is a, c, g, or t
aacattgcagcgggtataaccagatattcatctaaataaaacatgacaggaaacatgagaacaacaaagatatggttgagggtgtacccagaggagggtccaatgctaaaggcattggaagctctattctcactagtaccagccatggaaacagcgagtttgttcgatgtcgtagacctcagaatgtaggaagatgtttgtagtgcccaatcatgcgaacccaccagaggaagaagacggtgatggcgtgtatagggagcaatcgcgtagtcgctctccaaaaacctaatcgcttgcaaccccaagcaagatctcacgcgagcggtgattccggaggcacttgctctcctgatacttcgtgcgcgtggagcaccgggacggagattgtcttcgagcagcggaggatgtttctggtgtttctcgggttaaatctttctccagacgggacctaaagatggtatcctcgcacgcaatggtaggggaagaggctcgcggatagtgaagagacagaggtaggcgaaaggattgtaacagtaggtttaatcgtcataatccaaaagaagaaactcatggaattatgagacatcaagacacggcacgcacgcacgctaccaccgccgacctacctgcctgcgtgtctcgcctcgcctcgccaaatatttttacatgaaaaaagtaatgcaattaagaatccaaaaaccttgtttaatctaagaaaattcatagaaaaaatttagctaataaatcacatgaaagtttcataactgtctgagctaaaacaaattttctaagattaaaccaggttttagatttttttaattacattattttccatgtaaaaatgtatttggatatttttgaaaatttatttctttttagatttttagatatttcttatataaatatttctagcctgattttttctttaaatttttaacttagttcgatttaccccttctcacgtggcgccatatcagcaaatcagcgtcaaaattgcttataggatgcaaagatatggtttaaaagttgagaggttaaaaaagctggttttgtatcgacctttgggcttgggcttcgatttgggcaggcgcctctgggccaagcaagtcccaggaaggtggtgcgttctaccgtgccaggctactgtgcccgcgccacttccctggcgacttcaggtgacgctgagactctgagagaagaagcgagggccaggcgtggtaactcccggtctccttggttggacctcggcgaacccctagcagaagcacctataggtaactggcagcgtgccggtagggcatccatgtggccaccgagccttcctgggaggacggccgcacgtcaacggtatcaagtgggccgtgggcgccacctgttcgacgtaatgtgtcaactggtaggaatttcatggatttttttcctttgaaaatgtgtggccttgttcttctttctatgttctgatcactgtgtacttttcttgagttcttttcagtgagcaggatttgttccccaacagctatgaccattgaccaatggctttatgacatattcgagcttgtctggtcaaccagaaaattaacacagtttgtctttttatttttctttcttgagtgtcgacgggggaatctccctttgaggtcattagataagatttttccatttggaaggcagggcgggcctcgtcacttgtccggctctggagacagacccctgcactgaacaatttgtctcaccttggctaattctcgcaacacccctttttctatatattttgtctttccaaaatttactgatctgaaaataaaatcatctctaggcattttgtctttccaaaatttacttatctgaaaataaaatcatctcgaggcatgttcaggatatatataagaggcggggaatgcatagcataccctcggcctatgttttttttttttgaatctgtaattgtcgaatgtgtctcatcaaaaggtatttatttactagactaattgtgcgatgttatggtgtacacagctgaggacctgatcaagaatgcccaggtggtagccatcatcgcagcgcctcaagtgtctgccgaagcagatttgcttgcccaactgggcagccgcaactgcattccagtcctctccttttcttgtgtttctccaaccttgcatctgcacacggtaccttactttgtgcaaacatcacccaaggagtcctctcaggttgctcccattgtcgacatcgtcacctctttcttaggacgtgaagttgtcatcgtgtatgaagattcaccttatggaattggcattcttcagccactcaccgaggcactgcagagcagcagtgtccacacaattgatagtgtggttgttccaattggtgtgactgatgatcacttcgaccagatgctctatcgcctcaagaacatgtcagcaaggctgttcgttgtaaacatgcgcacagctcttgctgtccatctattttctcgggccaaggatgctggcatggtgactgaggattatgtctggattgccactgttgctctaggcaatgtagtggatggcctcagccctgatgacattgataacttgcaggggattttgacactgcggccttatgttcagggtacaagcttggctaggttcaaggcaaggttccacttggagaatctgaacactgaccgtgtgcacaccccaagtgttctgctgttccgggcatacaatacggcatgggctacttgtatagcagctgagatcgctggggtatccaggttggctatccgggtggcagaaatagatttgagcagacatggtttgtctgcaaacagaagagtttttctcgattcattctcaacacaacatttgatggattgactggagacttcaggatggtcaatagagaggtgcagccaccatcttatgagattgtgcacgtgaacaggaaaggtgcattgggagtaggtttatggacaccaccactgtctttgcaaccacaaaaactaagtagaaaaggatatagctttgacaatagcagaaggtctgtgttctggagagaagatacagtaaggacctctaaagggagggagaagacaggctttccacttaaccttgacactaaacattcacttaacctagagtccaagagaagaaatgccagaaaattagtgggaggaagatcggggaagttgtgcagaagctataatgagaagctactcaggattggtgtgccacagaaagatggtttcaaagcttttgtgaatgtttctcgtccttatttcttttgcaaggataatgctactcgtcctagtaccacaaaacaagtcactggctacatcattgatgtatttgagactgctatggagaagctgcagcaccccccatgctatgacttctgtgtcttcgatggttcttacgatgagctagtaggcaacgtgtctttaggggtgagtctaaaacctgtgtatttgcatcacatacttttacattactttactttcttttcgaaaggaacattgctttacttgtcagttatgacattatgatttatattcattgcgctttgtgtttgtctcttctaattggctgatggataaatcagatccttgatggagcagcaggtgatgtgaccataactgccaatcgaacaggacaagtggactttacaatgccatacacacagtctggtgtgtctttgcttgtgctatctgagagtgacttagaaccaatccagtggaccttcttagcaccactgacaaaggaactttggttcgcaactgtgggtttcttcttcttcactgggtttgttgtgtgggtgattgagcgacccagaaatccagagtaccaaggatcaagtctgagacagttcagcaacgcttcatattttattttctccactttgacattttctcatggttagttgcttggtcttaacttctttataagtagtttactaaacttctcttacagtattccttgaataacctgttatcatggtcactctatgcacagaccatattattaggagcctgttgtcaaaaattgctgtggtgatatggtgcttcttagtgctggtactagtgcagagctatacggcaagtttttcatccattttaaccgcagagaggctccatcctacagtgaccaacctggaccagctccttgtcaatggtgattatgttgggtaccagcataattcatttgtgtactccatgttgagagatcgaggtttcagcaaacataggttgattccttattcgagggaagatgagtacgcagatgctttgaggaaggggtccatgaatggaggcgtgtcagctatcgtggatgaggtcccctatttaacatctttcctcttctctgatgctcgataccagaacgagttccagattgttggtcacatatacaagaccccaggacttggcttcgtaagtttctcaaccttatgctttggtagattacctctcttttaccagtagaatgaaatcgcttgtttctgtaacccttcatattcggcatcatgcatgggaagaaataatatggcctgattggcatcgtgttcttatcaggtatttcctcaaggttttcctctgttgcataatatttcaactgccatcttgaacattactgaagggaatgagggttcacagtttgaagaaaaatggtttggtacggctgcgacaacaccaacagtttccaacaagccttccactcctctaactttgcagagcttctccggtctgttcctcaccagcggattcttctcttctctcatgatgctgataagcattatgaggctggctcatgccagatggaccgaactgagacacggggacgcagatcccatggacaatatttccggggacgaagaatttcgtcagctgcaccctgaagcgtaacggggatcaccaacaagttagtagcggaagtgatgatgacaaagagtagtgcgtttgggcatccaagctaaacaggtcagtgtccgaagatgcatagcaactgccgacgtgatgctagtacagtctacaataaggggtgtgtgtgtgtgtgtgtgggcgtgttggggtgggggtgggggtggtgggggttgaaagcgcgtgtaaattagctacggacatatgtttcggtttacttgtgttttgggaaggggatatgacacatgtatcagaggttatatgacgatgctatcttattaatttgcatcagattatcttctgacaaattaataagatagcatcgtcatacaatcgaaaactgcaatccaaattcctttgactattcaagcagaggctaacgttgacagtcggttctctgttatatgttcgtttattctgatgccattggcagaaatttaatttcttgctgaattctagcaacacatnnnnnnnnnnnnnnnnnn

SEQ ID NO: 5018 - DNA, 4596 bp, Sorghum bicolor
cctgcaaatatgtctggccacttggtcgattgtcagaactatgcacctcgcattctgcttctgatgtaaggcttgatgaggtctcagacggagatccttccctaaggaaagggctaaaatctatgtcatcctcctccatgtcatcatcaacttccatatttgatgatgcaatagtgttttaaccaaaacagtaggattcctacaacctaccatccataaagtgtaaaaaattgtgttaggatcagcactttgcaagaaaaaaaagatgagtatgcaacggcaagtcagtaaaactatagcataacacaaggatatgaacaaacacccatgtacgatcaaacctgggttacacttagtacccacataaccatattttattggcagatagaaataacatagttgcaacatgtttaaagcactcatctatatttcgaaaatatgaagttttgaaacaagacaactttaagccaaacatctaatcgaaatctaaaaaaacaaaatgattgcatcacaggtacaaatacaatacaatactaaaccataaaaagaaatatcatgaataccaatgatgacctaaggcttcaatatcagagaatgtaatgtgcaagattttgaaacataaatttaaatgtaagatggtcagattatgcagaaaggatatgactgcacaacaatgtttatttgaacatgtaggcttggtggggttttgtgttgttctttcgtaagggatcttaccctgtgttttgttctcttcttaatataatgttacacagctcttctgcgtgttcaagaaaattaaatttaaaccataatagtccagataatgcattttttaaaataataggaatttgtggaggataagcaagccagggtagccttctgtaggtaacagttctgttctgacatgaacttaactgaaatgagaacctaacaaaatgtcaatcaaaatccacaacttgccaccttggtgctctttcaaatgtcgcaattctctaacacaaaacaaaagatgtagcaaattagcattataccattacaacaacctatttccttgaggtactaacaaaacacagggagtggggggggggggggggggggggtcgggcacacagcagagggtagcaatattgattccgagaacagcagtggtgtaggctccagatagatgagcagattgtggcaaggggctgacttagggcgaaacatccgtcacttttcaggagaacaaactgcaccggcaccacaattggacattaaatagcgtggcatatatcgatcctgtgagctaaagatgaggaacacgaatctaatcgaaccatggatggatggattggcctcctagagaaccactacaccacgaaattttgcagaaaacccattggagatcgaagggtttcagaagccggagacatcggccctaagcaagtagggttacttacaatccacgcccagatgggtgtcgacttcacgcccgcagaccagggtcgtagcgaccccgctcccgcagaagcggcgccgcagcaaggccgcgccggcgtcgagctcggccccgccccgccggagaactgggtgcgcgcttgcagagttgcagggtgttttttttttttttgattcccgcgcgtgattcagtggacgggtttcatgccgcatccaactcgttttttttatgttcctaaccgctaatcgttttctgggacccacagtcagcgagatatcatggaacgaggcctcctattcgtaattgggccagttatgttgccaaatcggcccatcatggcccagatggaaaaaactgaaaaagcaaagattccaacccattaaccaaatggcccatttaagctcgcgacctttaaaccctagctttctcaagagagcccttcagaaaatcacaaccgtccgatggactctgcgagacgatcaaggccgttcttctcttcgtccgctgctccatacaagccgcctgccccgcctccggcccgtctcgttgtcttccccaatctgcacgagctgtctatcgtctccggcggcggaagcggaaggaagcagaggcggccaccatggtgaagggacgcacggggcagcgcgtcaggctctacgtccggggcaccatcctcggatacaagaggtgagctccacgccgccgcttcttcccccgtcgctccgtgttacttggatctggtcatttcgcggttctattcggcttacggtggttgcggtggtggctgcgcaggtccaagtcgaaccagtacgagaccacgtcgctcgtgcagatcgagggggtcaacaccaaggaggacgtcgcgtggtacgccggcaagcgcatggcgtacatctacaaggccaagaccaagagcagtgagacccgctacaggtgcatctggggtaaggtcacccgcccgcacggcaactccggtgtcgtccgcgccaagttcaagtcgaacctcccgcctgagtccatggtcagtgacgcagtcagtgtaccctgtgtgatgtgttagtttcccaattgatgcactgtactgatgttttttttctggtgagtgcaggggcgcaaggtcagagtgttcatgtaccctagcagcatctaaggttagattctcagacgtctgacattctctaagtttggatggttaatattgaagttgttgtttgtgatcgtctgcttagactgcacttgccattgctgtagatcatgggctacgagttttagtggttaaacgcatcatagtttgtggtttccgttgtttattaggaggcacattgagtctgtgcagcagcaaacagtgtctatccagctgtgaatcatggtaatttggcttttgtggtttggtttccttatgttgatattggctttgggtgagttatagctggctgagggagtaattcacttcgtgaagatttcaaatttaaactgctgtttgctattttgggtttacatgtctcaatgataccgagtacacgaaaaatatacattatctaaggccttgtttagttctgaaaattttttggttttggctagtgtagcactttcgattgtatttggcaattattgtccaatcatggactaactaggctcaaaagattcgtctcgcaaattacaggcaaactgtgcgattagttaattttttatctatatttaatgtctcatgcatgcgtctaaagattcgatatgatggggaatcttgaaaaattttggaaactaaacaaggcctaatttcattagttttcagtaatacatcctctgttcacaaatgtaggcatttctagtaggaaaggaaatgacacgctcgacgctcctcatcaatgataagtgtgataaaactgctggaaaattcagtgaaggaatggggatggcggcatatgctagaaatgtttacatttgttgaaacttttgaatgctaaaaattgttactcctatggacagagggagtatataattgctccaactaatgtttttccagttgttctctatcaattattctatttagtgagatgtctatcaccatttgattatatcaggttctttgcattggagctcatcagtgctgttttgcatcagttcttaattgtgctgtcatttcacactgtatttgataaagtgaatgccgattatgagcacttcagacttagcaatttttatttttaccatttatattaatgtccaagcactgatgtttaggtaatgtttattgcctttttgatacaatagaatggttgtaaacataccttatcctgtttagattagaaaattgggcatgtggctcccaacacaaagtttgaaagcttgatccaatccaatgcttaacccctttaaaaactcccaatacatagcatgtgatgcctttgcttatgcttttctgggcttttatgtctgcaggttttgttggagtaaagatggactagaaatggccatgcgtatttcttacttctctgagcttaaaatgccatgtgttggcaacttagattgttcatgtactgaacctgtcgaagttctgccaaaatttgttgtcgaacggatgaactattgtcatattgttatgcccgcagcagagcatatttttgccccgtgacatcaatgtctgattgcagtattttcaagttcttgtgccacgtctcgaataccatcgtgcaatatgatgtcggtgtgggtgtgtgatatcttttacactgctctgagattctctgatgctttgatgtacgctttttcaaaaccatttctgcaaaatttatggacacacgattagctggtggcgatgtacctggcctttgtatacatgggcgtgtttgtgctgatcatgttcaagccaaatctacgatggatatgtcaattgcatagggtctgattgttactcgcagtaacttgcatagcctggagaaagggttgtccagggaaccaatcagaccctataattgcgttgaatacacgcaaggtatcatcaggtgcagtgaactactagaaagcaatgacccaatgaccttcaatcaacatctcttacagttttacagctcaccaatcgctttttcaagaatcagctacaggtaattcttttttatgaaatctgtcattatgttacctcaagataatcacacttgttt

SEQ ID NO: 5019 - DNA, 13685 bp, Sorghum bicolor
ggcgtggagctcacctcttgtatccgaggatggtgccccggacgtagagcctgacgcgctgccccgtgcgtcccttcaccatggtggccgcctctgcttccttccgcttccgccgccggagacgatagacagctcgtgcagattggggaagacaacgagacgggccggaggcggggcaggcggcttgtatggagcagcggacgaagagaagaacggccttgatcgtctcgcagagtccatcggacggttgtgattttctgaagggctctcttgagaaagctagggtttaaaggtcgcgagcttaaatgggccatttggttaatgggttggaatctttgctttttcagttttttccatctgggccatgatgggccgatttggcaacataactggcccaattacgaataggaggcctcgttccatgatatctcgctgactgtgggtcccagaaaacgattagcggttaggaacataaaaaaaacgagttggatgcggcatgaaacccgtccactgaatcacgcgcgggaatcaaaaaaaaaaaaaacaccctgcaactctgcaagcgcgcacccagttctccggcggggcggggccgagctcgacgccggcgcggccttgctgcggcgccgcttctgcgggagcggggtcgctacgaccctggtctgcgggcgtgaagtcgacacccatctgggcgtggattgtaagtaaccctacttgcttagggccgatgtctccggcttctgaaacccttcgatctccaatgggttttctgcaaaatttcgtggtgtagtggttctctaggaggccaatccatccatccatggttcgattagattcgtgttcctcatctttagctcacaggatcgatatatgccacgctatttaatgtccaattgtggtgccggtgcagtttgttctcctgaaaagtgacggatgtttcgccctaagtcagccccttgccacaatctgctcatctatctggagcctacaccactgctgttctcggaatcaatattgctaccctctgctgtgtgcccgaccccccccccccccccccccccactccctgtgttttgttagtacctcaaggaaataggttgttgtaatggtataatgctaatttgctacatcttttgttttgtgttagagaattgcgacatttgaaagagcaccaaggtggcaagttgtggattttgattgacattttgttaggttctcatttcagttaagttcatgtcagaacagaactgttacctacagaaggctaccctggcttgcttatcctccacaaattcctattattttaaaaaatgcattatctggactattatggtttaaatttaattttcttgaacacgcagaagagctgtgtaacattatattaagaagagaacaaaacacagggtaagatcccttacgaaagaacaacacaaaaccccaccaagcctacatgttcaaataaacattgttgtgcagtcatatcctttctgcataatctgaccatcttacatttaaatttatgtttcaaaatcttgcacattacattctctgatattgaagccttaggtcatcattggtattcatgatatttctttttatggtttagtattgtattgtatttgtacctgtgatgcaatcattttgtttttttagatttcgattagatgtttggcttaaagttgtcttgtttcaaaacttcatattttcgaaatatagatgagtgctttaaacatgttgcaactatgttatttctatctgccaataaaatatggttatgtgggtactaagtgtaacccaggtttgatcgtacatgggtgtttgttcatatccttgtgttatgctatagttttactgacttgccgttgcatactcatcttttttttcttgcaaagtgctgatcctaacacaattttttacactttatggatggtaggttgtaggaatcctactgttttggttaaaacactattgcatcatcaaatatggaagttgatgatgacatggaggaggatgacatagattttagccctttccttagggaaggatctccgtctgagacctcatcaagccttacatcagaagcagaatgcgaggtgcatagttctgacaatcgaccaagtggccagacatatttgcaggatactgtagttaatgaaaatacaagtgacagtgcacttcctcaaaatagactgtcgtctcaagatcttgtcaacaaaatatttccagaagaaacgtctacccaggttaatcttgagaatggattggaaaaagacgctttaggaagcaaagctgcttgctctccaacagtgcaaaaccctcatcacctatctctcaaaattagtgaggaagatgcaatttgcaggcggacgagggcaagatactcactagcaaactattcacttgaagaattggagacctttcttcaggaatcagatgacgatagtggtctgcaaaatgttgatgaagaagaggaataccgcaagtttccttgcttctgtcctgtctggtataggcaatgacacacaggcattacagggggatgaaaaccaggatgaagatgataatgatgcagactttgagctcgagattgaggaggccctagaaagtgacgctgatgaaaatgctgagaactatgacgccacaaatcatagaaaagagaaagatggacgtaggcctcagactaggcagaggcgtccatttaccaagttgtctggggctggtagctatcatcaggaatccgataaaacaaattttagaccaattgtgccatatattccatctgcattggtgactcctgctcatgcttttggatggcaatatcctacccagaatgcccttcgcccttcatccttggtttcagtaccgtgtgcacctttagcatgtggatttactgatcagcaactcgggcaactgcatgtgttgatatatgagcatgttcagctccttatccaaacattttccctatgtattcttgattcgtctaaacaagatgtggctaataatgtcaaaaggatgatagttgagttggttggctttcgtgatcaagcattggctaggagtgctactcaacagcatatcgtttttgaatcccggcatctctcatctagttttgtttcttctgaaattttggaatgccaatggatgccgttaatcaagagtcctgttatatccatccttgatgtcgcaccacttgagttggccctcggctatttaagtgatgttgcaactggtaagttcaagattggtacatgggccaatttttgatactttgcttcttttgtttgtcaccacttgactggtaactttgcttgcatattgaatttacagctgtcgtgaaatatagaaaaagtcatgttgatggcactgctgacaaaacccgcaggaaagagcccctgtttcctttaccagtgattaacagttgcaaagaagtgaataatgtttctcaagatagatcaaatagtgtgcctacagcatcatctccttcatctgggcggttgcagcagaagaaatcgttggctgctaccctgcttgagcgtactgaaaagggcacagttgctcttgttcctgctgacattgcaagattagcacagagattcttttcacttttcaattttgcactctttcctcataagccacctccttcacctatggccaatagagtgtttttcactgatgcagaggacaggtgtgttttaatcttctccaagatttattttgaaatagaatccatgcatgcttccttgccatcttgacttcaaaacatagaaattcaagaaagccgaatacttaggttttgttgaactgcatactgtttttatttctgtattagtgatgtttgtttatgcaaactgtgtgtttacttccttatctgctgtatcacagccattccattcatctttttttttcaactttcctcaaggccgcctccttctgcatggttaattgtatcatggttgctttgttgttactaccactgtcctaaaggacatcatgtagtgccctcctaaattgtatagctgatatgatgcggtgatgcctatcacttccttttcacggttaattttatagtatattatctgcctgcagattgttagctctaggaattctggaatataataatgattgggaagcaatacaaaagcgctttcttccttgtaaatcaaagcatcaggtatttttttgttactccaaaagtttccttttatgatttgtcaggcacaaatcaatagttcttttttatcatctatttggttaagattgacatgtcatgaaatagtttatttttatcttaatctaacaaaaaattgggagcaatgaaggacatgaaataccctcaaggaatcagtatagaaaaaaagaagttgttttgactgtattgacatggcaataacattttgaccttgctggcattaactcttggcttttttcaataaagagtttgaagtctgaacatttattttcacaaaggtctggttgccaatttactttgctttccttttgaccgcacaaacaagtaagcttggatgaaatccttcatttttttcttaatgaactgacacgcaagtctcctgcttattcgaagggggaaaatccttcttctaatctctacatacaatcacaacctgagactgtttgttcaatttctataatgccttttgcttagttgttgtcttaaattgttagttgatcatgatctttgataattccttgttctggacttgtgtgttatgcctgctgagtgaaataatttctttggtgcagatatttgtgagacaaaagaatcgtagctcctccaaagctcctgataatccagttaaggtaaatattttgcccttcttcatttactggaagataagatgctgaattcaattttatatgccttttagggttcaatattcaacattatggtcaaggtgtccattgagttgcatagtagtgtaacagattaacagtttgtgctaacaaatagcagtatgtttctcattctatattgtgtagtattgaagttctggttttgaactgtaagatataatctgctgtccctcttgtacttttgtcctgcattcggcaggttcaagtggtcagctcttggctgccactgtagaagtatggcaataggccatttagtcttccatagttggtagaagtacaccagctagagtagtgggctggtttaggctggtacaagagtaggaattggctgagataagccatgtagtgtagttgttggagtggtgtagtcaccatccaagtagtgtaccagcaggtacatagtttgtgtatatataccctacctattgcaatggaaaaactcagttcaattgccactcattcagtccctgtttcggtctgaaaccgtgtgtgctgtgtgtgtgctgtgggagctcagggctcttcttctaccttggagcaggggagagggagagggagaggggaggagagcaggtgctgctcacctcggtgcagggtctctgtgccaacaattggtatcggagccgtacaagccatagctaggtcctctgaccagcaatggcggagagtgcgggccggaatggtggcggggaaggtggtgagcgacagctccagccggcgccaccgcaggttgaggtgcgcgtggtgaaggagttcggtggcagcgactcctggcccatgctcacccgcaccaactacggtgagtgggtgatgcagatgaagtggaagctgcgcgcgcggaagtggtggcgggcgattgaggaggatgaccgcactaaggacgcccaggtgggagtcatggaggcgctcatggcctcgacgccggcggaataccacgaggcgctgggcgccaaggagaccgcgaagcaggcctgggagatgctggagtcgctgcgtgtcggctcggaccgagccaagcgggcaagaatccagcagctccgcagggagctcaacgacatcaagttcaagcccggagaatcggtggaggagttcactcttcgtcttcaatccctggccacgcaactggccacctacgggaagaaggtggacgacgaggacctcgtcaccaagctgctgtgcaccgtgccggcaaagtattcgcagctcgccatgtccatagagacgatgttggatatctccacattgtctctggaggacgtggctgggcggctgcgagtagcggagagccgcatcacgccgacaccagagaaggagaagcccaagctactcctgacggaagaggagtggaccgcgcgcatgaaggacaagcgccggaccggggaaggctccaccagccgcggcggagatggcgccaaggggcgcgggaagccgtcgacggacaagaagaagaagaagaggaacaccgaccccaacgcctgcaggcgctgcgggaaggtggggcattgggcacgagaatgcccggagaagaagccggagaaggaggaggcccacttggctcgggacgacagcgacgacgagtgcgctctgttgatgggggagtgttgcgcgctgcaggaaggcgaagcaggggaggcggaggcggagcaggggactgcgccgcaggccgtcgaacttgacgagtctcgcgcgcgtgtcctcctgggagcggacggcgaagagctggagcagaggtggtacctcgactcaggcgcgagcaaccatatgacaggaagccgcgctgttttctccgagcttgatgaagaaaccaccgggagcgtcaagttcggcgatggctcccgggtggcaatccgcggccgtggcactgtcctgttccggtgtcggaacggggaacatcgggcgatgacggatgtctactggatcccacagctgaagacaagcatcatcagcctcgggcagttggacgagcgcggcgcagaggtggtgatcaagggcgaagtgctgcggatccgtgaccaagatcggcggttgctggccaaggtcacaaggtcgaagaaccggctgtttctgctggaccttaaggtcgagcagccggtgtgcctggcggcacagtgcacggaggagccgtggctgtggcatggccggctcgggcatttgaacttcgacgcactgagcagactggcggcaatggtgagggggatgcccaagatccaacacgccagcgagctttgtgacagctgcctggtggggaagcagaggagactaccgttccccaaggaggcgaagtaccgcgccaaggagaagcttgagctggttcatggcgacctatgcgggcctatcaccccggccatgcatggagggcggaggtatttcctcctgctggtggatgactacagtcgctacatgtggttgcggctcctgaccagcaagagcgaagcagcagaagccatcaagcaactcaaggcgaaggttgaggcagagtctgggaggagactgcgggtgttgcgaacggaccgtggaggggagttcacggcggtggagttcgccacctactgcgcggaggagggagtggagcgccatctcacggcgccctactcacctcagcaaaacggtgtggtggaacgccggaatcaatccatcgtcgggatggcgaggtgcatgctgaaggccaagggaatgccggcggcgttctggggagaggcagtgagcacggcggtgttcattctcaacagagcaccgacgaaggcgctgagcgggaagacaccgttcgaagcttggcatggccgcaagccgagcgtggcattcatgcgcacgtttgggtgcattgggcatgtgaagaacaccaagcccggcctcaccaagcttgaagaccggagcacgaagatggtgttcctcggctacgaggaaggatcaaaagcctacaggctctacgatccagtcaccgggagggtgacagtgtcccgcgacgtcgtgtttgatgaagcggggaagtggaggtgggaggaggaagacttggcgggagaagagggcgcgctcgggatcggtgggaccttcaccgtcgagcaactggttatcaccagtcaagtccacgcaccaaccggagtcgtggaggaagcagcagcccctggagcaggggaagcagggggcgaggcgacagcagcaggggaagctgagccgcccagccccaccacgacgggcggcaccccgcctcactctgtctcaagacaggagcagaggactccgaccacggctcaagtggagtatgccactccaccaccagacgtcaccgaattcgtggacgccttccacgacggcgaggaggtacgatttcgtcgtgtggacaatgttctcggtgatgcagcaactccgggactggcagcacggttgctgggcgaagaggaggagcttatgatgctgagcacagaagagccggccaccttcgccgcagcagagcgcgagccggagtggcggcgcgctatgctggaggagatgcggcagatcgaggcaaatcggacctgggagttggtcgatccaccggctggatgctggccgatcggactcaaatgggtctacaaggtgaagaaggacgagcacggcgcggtggtgaagcacaaggcgcggctcgtcgctcgggggttcgtgcagcgagaagggatcgatttcgaggaggtgttcgcgccagtggcgcgcatggagtcggtgcgactcgtcctggccatggcggcggccaaggactgggctgttcaccacctcgacgtcaaatccgcctttctcaacggcgacttgacggaggaggtcttcgtcaagcaggccccaggtttcatcgcacagggggctgagcacaaggtgctccgcctcaggaaggcgctctacggcttgcggcaggcgccgcgagcgtggaactccaagctcgacgccaccatggcggagctcgggttcacgcggtgtgcaacagagcatgccctgtacacccgccgacgggggaaggaagaactcgtcgtcggggtgtacgtggatgacttaatcgtcaccggtgcgcgggagaaggacatctcatcgttcaaaaccgagatggcggcaaagttccagatgaccgatctcggtgcgctgagctactacctcggcatcgaggtgaagcagggaggcaaggcagtcacgctggggcagcgtgcctacgcgcgcaaggtgctggagcgggcgggcatggagaattgcaggcctgcagcgactccgatggaggagcggatcaagctgtcgaagcagagcacggcggagaaggtggacgcaacgcgctaccggagcatcgtcggcgggctgcgctggctcacccatactcggccggacatcgcgttcgcggtcgggtatgtaagccggttcatggaggacccgcgggaggatcactggatggcagtcaagcgggtgctgcgctacatccaggggacgatggatcaggctctcgtcttcccaaaaggcggggggtctggttcaggcgggctggagctcgcggcttacaacgacgcggacatggcaggcgatgtcgatggacgacgcagcacctcaggcgtgttgatcctcctcggcgcggcacctgtcgcctagcaatcgctgaagcagaagacggtggctctgtcgacttgcgaggcagaatatgtcgctgcagccaccgcggcatgccagttggtgtggatgcgccggctgctgggggagctcacaggcattgagccccggccgcctgtgctcaaagtggacaatcagccagcaatagctctggcaaagaatcctgttctccacgaccgaagcaaacacatcgatgtgaagttccacttcctacgtgattgcgtcgaggagaagcagattgtcatcgagtttgttgagactggtcgacaactcgctgacatcttcactaagccagttgggcgacttcggttcttggagctaaggagcaagattggcatggtggaggtcaagagtacacagcaggattaggggaagattgtaagatataatctgctgtccctcttgtacttttgtcctgcattcggcaggttcaagtggtcagctcttggctgccactgtagaagtatggcaataggccatttagtcttccatagttggtagaagtacaccagctagagtagtgggctggtttaggctggtacaagagtaggaattggctgagataagccatgtagtgtagttgttggagtggtgtagtcaccatccaagtagtgtaccagcaggtacatagtttgtgtatatataccctacctattgcaatggaaaaactcagttcaattgccactcattcagtccctgtttcggtctgaaaccgtgtgtgctgtgtgtgtgctgtgggagctcagggctcttcttctaccttggagcaggggagagggagaggggaggagagcaggtgctgctcacctcggtgcagggtctctgtgccaacatgaactgatcttaaacattgaagagaggtgctttataaaatcatgtattgtatatgtagtgaagtttctgctgcagcacttacactgttgataatttttatctctctcattctgatatctataccatttttcttatgtgccaacaaaatagtagtattttatttaaatttgttgacaagatgtggataaatcacatttatttaataatgtactcagtagcaaactggagagatgcttttttactactctcttagtggcacatgttgttctgcttgtatgtggagctatattattcaacctttggctactagattttttttttcaaagagtatgtatatatatgttgtggaagagtttgtctgtgtatttccttgttctgatactggtttgggttgggtcgattttgccatgttgtgtattgtaatggtcaaccagatgggagattttgagctcattgactgctttcagcaaaactctacatgatagccttccaactaactatattcttatttgaattaatgcaggatgtgcgccgtatgaaggcatctccattgactgtcgaggagaaagaatgtatcaaggaggtgataacttgtgactgcaggctatctcatttttttcatgtttgatttttgtcgcataatttattccatacctactgtgatttcaggggttgaggatattcaaaaacgactggaaatcagtttggaagtttgtagtgccacatagagacccttcactgctccaacgtcagtggagagttgcaagtggagtccagaaatcttacagtaaaagtgatgctgaaaaagaaagaaggcgaacatatgaagcaaagaggagaaagctgagagtatccatgcccaattcacgccgtgggcaagaggttagtatgtttctctaacttgtaggatattcaaataatatcataatctccatctaaagtgatgtcattgagcataatttttaatgctttcatcacaggctgataacaatgcttctgaagatgctgaaaatgatgatgattcatatgtcaatgaagcatttttggaagacacagatagtatgccttgtcagcaatcaggcacagacctcgatgaagaatgtggtactgcaggtggttacattgaaccccagaaactaagtggtgcgaaacttgatgtaaccacctcatacataccttttatgtaccgcccctctgatggcccatcatatgtgagagcaccttccactgcagctcaggtggtatcatgtggatctctggaccaactgccagcttcccaattgagtaaacagaaaggtagttgtgtggtcaagttggctccagacttgcctcctgtgaaccttcccccttctgtccgtgtcctatctcaggtggaattttatcggaactcaacacactttcatggcacctcggataatgcagcaaaggatatgtatcccgtgccacctttgacctcctttacagaaagtgctgatagacagctaaatctgttccctgatcacagagctaattctagattgcagcagaatgggatctctagtgataatgctacagaagatggtgctgagcaagatttgcagatgcatcctttactgtttaagtatcctcgagatgtttcgtcatatagtcacccggttcaaaatcttattaatcagtcaagaaaatatgatcttttcccctttgagaaagttcaagttgagagaagtaacaaccagactacaggttccaccgaaaatggtactgtaaatgctaacaccatcgacttccatcctctcttgcaaagaacggaaggttatgtgcataatgaagtaccagaatatgataataaccttgactgccatcagtctgataataacatgagcgaaatcccagtagatgaccaatcaacagctgggcaagcatccacaagcccttatgagagggagacaagtattgacttgaacattcatttgtgttctccaatggccataaatgattcaaatgacttcagaagtagttttagcagatcaaatgttcaagatgaagtttctaggaaggacaaatctagtgttccagagcttgaggttgtaaattcctattcccatcattgcattcaagaacctaatgaagaatcaatgcaaggaattgtaatggagcaagaagagttaagtgattccgaggaagatagccagcatgttgagtttgaatgtgaagaaatggatgattctgaagaggagcaagttcagagtccagaagcctctccaattcaaaataaggtgatctttgcagatacgcctattagtattataataatattcatgatccttgtatagcattgtattatgatttgttcttaacaaaattccatggcattggaaaagatgttcagtttttgttattgctgtgttttgctttaacatgccaggaacataagcatatgtgattggttttgttttcatggttatacttaatttgtcagaaattttctcctctgttcattactctttatttcaattttctctttttcttctgatttttttatatgtttaaatatttcttgttcagggtatctcagcatcagttgtttgtggggaagttcatgttagtaatgaccacagtcaaatccagcaaggatctgttcaaaaggataaacagggtgcaagctcaatgcagaaaactcaagttccttctcggtcagtgaggagtaagctgaagccggaaactgctaactgcacaggatctagggcgagccaacattcgtccacttctcacacagctgaaactagccggagcaaaaccagaaattctaaagtgccacagggacagtcaagtgctgaacgcaagcccaatgattcaagaactagaaaaactctggccccaagatgaaggccaatttagcattttattcctgtgctgcatgtggcaaaggcagaatggctcagttcaatctgttgtcactctgttgctgagttgattatcctcaacaaactatgcagtgcatgctggagaaagcagacctagcgaacctctgtggtcatttagcttgaattgtcatgtgaaaaaagcagcaagaggagcataccaaatatatggattctccatttggataacaagacttaagtggtgatcttggcccagtatctggatgtttacaaatcatcaaattgttggtgactgagaaagtatacccatggaataaggttctgaacagccatgagacgaattcctctgactgacttgggagttttgtaccctgacgtcctcaaagattaattgtaatgcaccttgtaatttcaaccaaaaaggttaagttgttgtatctgcgttcattgtgtgtactgtgaatagagaaatgtatccaggcaagatacctggaaatctttttg

SEQ ID NO: 5020 - DNA, 8054 bp, Sorghum bicolor
taccgcttcaaagccgcgtggattacgtacaagtaaccggccggcgcgggtcagtcaaagcagcgcccgcacgtcgccgtttttttagccggctcgccaccggccggtggcgcccctacacgtgcggggacgacgagggccacggcacgcctaatcaactcaccgactcgtgctcattttcccgggtccaccagattatatatatatcaattattattaattaattaacgaaaaaaaagactgcgtaccaagagcaggaggaggaggaggagattagggtttgatgacgacgacgggcgacgatgatgggacgtctggtgcgaggcttttttttttgtctgctgttttctggtagggggactagtaggttattagtcggagtagcaaccggagaatgattaacgacgccgccgccgaccgccgtaggtcgcgacgagcaacggagcaggcgaggcgagcagcacacacatgcgccccgggccggcccggccccgtaggtgctgccaaatgtgggcccggccgcatggccccgatgtggggggatgctgacgcgatgcggggcccaccgtacagcgacgggatggcgggcggggaacctggtcagagcaggcgccgcgcggcgggctcggctcaaaactcgcgccgtgacacgggaagaggattagcatattggtccggttccggcccgtatggcgtcagcgtcgcgttccggccctcggtttccggctttattggttccaggtccatccccctctcggtttcggaccgggagtacaaatcaatctctctgtgtggaatcgaatcgaatcgaatcgaatccaaaggggacgttagtgtttgcacagagatggtaaaaggatatgatcgcaaacgatgagaaaaaaaaatgcatgatgtgaaagacggaaaaaaagaagagatgctcttggacaatttcagttccaatcaacctttcttttttttttttcattttgaaacaatttctggcaatagaacaaatactggattttctatatttgtttgctagatttacccaaagtaaatatttctacttttattactagattgataagccgaagaggcagtagtcatgaaatttatagtattataagagtaaataaaggtcatatgcttgataggttatgacaaagacaagaagcaagaacccttgttttcgttaggtttgggaataaaaggtaacggatttgaggaataggactagagcctaacctatgtctgttcttgtagtgagagaaaatttatcaaagatacataacctatgtatacccaccgtctcatctatgttattatgtatgttccactaaccatcctctataatatagcggcacaacaaagcgttctaatctttggaaaaaaagtcacaaaaaaagtgttctaacttataactgactacaataggacacaaaaccgctatgtgtatgagtcactagcttgtacataacgtgacacaacttttggcataatagtgttaagtaaatacacatgtctcgccttacatggaaaacaaaattagttgtgacatagtccaacattagtatgagctggcctccacaaaaacgatggccaacaaaaaaacacgcgcgcgcacaacacacacacacacacacacacacacacatatatatatatatatatatatatatatatatatatatatatatataaccatctttgtaagcacatgcttcaattaaccatcccaaacaaaattaccataactacatgatagataccacaggaacacgatattcctctacaaggaatcggcgtcgacacgacacaacggaaaaggtttgcatcgatccccaaatgtttttgtttggccatccatttccagcccaaaaggcatataaaaggataaaaggatgcgtgcagaaataaacaaaaacagggggtgctactaaacaaaaagaggggcggcaccaattcattcaccaactgctgtctgtctttcctgctagcgctgagcgagcgagcatcagaaattcagcagtccaacgcgtctttccagtcttcggcaccggcaagcaagaccgcaaaggccactcctttttcttctccgcccaaaccgccgcctcctctcctctcgacctctcctctccacttctcatcagggtctcacctcagtcacctccacaggcacactcctcttccagtcccggcaacggaagcttcactgctgcgctcgactcactggtaagtgtccagtctggttctcccccccttcaacggggccagctttcagtatagtcttgatctttcgagagcgattcactgcatgtgtataatcaccctgctacgcgctttgtgtacttgtttgccttgggccttggctttgttcttgatgtggttttggtcgcccgtgcctgccctctgtggcggcgtggcgattggcgtttcttggtggggggtttgtttgtcgtgtcgcgattcgcaaagggggcaagaacaatgccagggatggtccagatggagatggacgatcgcgtgggattgattgattgattgatgcaggcgtaatgtttttgatcgtggtttcttttatttgttccgacgattccgtagatggatacgggtggtgagaattttatcttctttttttgatggattttttttatcttcttgtccacaactattcttgtctgcctgaatctttatcagctcaatcttggagggagaaaaggaaaaggggaaagaaggatgtgttgcgtgatgaattctgctatagagaaatgagacgaatatcagccgcttttgtttgtatgtctctgttttttttgtttggctgacaacatctctgtttcgcactagcccgaaggcataaatgcagtcggttgttgatgacctctagttatgagtcgtatggtggacattcaggggcttttaagtgatcctgtagcgtcagagataaatggtgacaggcgtttttacaattattgtatcagttcagcgtttctgactactgattaggcgagtgaactggtatgacgtatgagtacgggagcaattgatggtagcaatgttggcatagacattcatcctctagcttcacaaagagggaaaatagtcagtgggtttaactatagggtcgtatatatattctgccgtcaaaatggacaatgatagtgttcatttattgtttcttaactgaatatatgtgaatcagttgctgttttgttcgaagaaaaattggtgtcgatggctgtagacagagaagggaagttgtgttcacttggcaatgtgatcaaagaagaataatttatttaacacgattgctgaaacttcaattatgcttttagttgtcgcatatttctttataatacagaatggttcaggatggaagcctgtgttgtgtctaagctgttataatttgctgcatcagtaattatacaactcttttctaatagttctgcgaccgaagtagagtatgtccttgtttctattgcccatcccaactttcattttcttaggtaaaaatccagactattgaaaaattcattccttcatgaccccattcgtagaagatttctatgcttgactgccatgaagatgacagtgatgtgtgctgagggcctgagggttacctgtcaactgtatgcagtaaacatggggaggtcaaattagttgggcatattttagtgttgcttattcaattgattaacgtgtgttccaaaaatatatttcttcaggatctttatgctcgcaaggattatctgattatatacttttgcattattggtccatacatgcaatctatgaagaattgacagctgttcttttagcatcattatgtcctgcctttgtataaaaagaagcacacctaccattctctttaacgacttaactgattttctcttttgaatgcaggcatcaccatattgtcaacccggcatattttcagtctgtagaagccatcttttaaagaacattttgggcagagattgccagtaccatttcttgtgttaacatggacttctcagctggttcctacttctcatcatggcctgtcaattctggttctgagagctacagtttggctgatggttcagtggaatcatatggaggagaaggaagcatggcaccttcaagctatttcatgacagctagatcagatcacaatttaaaattcagtgtgcatgaacaggattccactatgcttccaaatgaacagttgacctatgctggtgctggccagactgatctgttacctggtgatactctatctagggataagctttgtgaaaatcttctggagcttcaacgactgcagaataacagcaatctgcagagtaatttagtggccccaggagtgcttcagcacaattcaacacctggggtctttcatccacagttgaatactcctggactttcagaactgcctcatgccttatctagttcaattgatagtaatggaagtgaagtttctgcttttcttgctgatgtaaatgctgtttcttcagccccaactttgtgttcagcattccaaaatgcttcttcgttcatggaaccagtgaatctagaagctttcagttttcaaggagcacaaagtgattctgttttgaacaaaacaagccattcaaatgggaatatctcagtgtttgacagtgctaccttggcatcacttcatgtaactctcattacagagatagcttcttcttcttccaaaaaaaaaacccctacaaagacagctgctatgcatttatctcattcagttaaattaattttgggttccttttgtaatacaggacagcaaagaatttatcactggtaggctcccctcatttgctagtgtcaaggaagcaaacctagcttctagtggtttcaagactcagaagcaggttattaatgtaaacattgctactaaagagaatgtctgaactgcatcttactgttaatttgaactgtaccagtaacaaaacttccatactgcaggagcaaaatgcaatgtgcaacgttcctctccctgctttcactgcacgtaatcaaatgtcagttgctgcaacgcaaggagcactgatccctcaaaaggtttgtatgttttcaattaaaagaatacatttctgctcagtcactgtgttccttttatgctgtctttcaagattgtacctgacatggagttgttacttcaaatgtttagattccttcatggatcaatgaaaacaaaagtgagggtcctgttagccatccttctgatgtacaaacccaaccaaattcggctggaaatggtgttggcgtgaagccacgagtaagggctcgtcgtggacaggcaactgatcctcacagtattgctgaacgggtgagtttttatttatgagatcagtccacttcagtgcaaactgaagagttgcacaatagttttgaattatttgttttgcttgctctatatagcttaaattttaactacaatttcgtaatctgttgcagcttcgcagagagaaaatttcagataggatgaaaagtctgcaagatctcgtcccgaattccaataaggtacatttctttgggggcctaacttgcccgctgcattttgatattgcagctgcatttctttgggagctaattatcaaaactttgctacttatatatgtaatgggaacatgtgtttcttagttgtggcttgaaatatgcaagacgcaatagaatggagcatttattaaatttaaggttcttctttggggttgaattgtaagtcttcaactctacaaatacaccagagcgaatgtttaatttgtttgggccaacaatagtcattacctgtttagccattggttcagttccactgtgagttacttgatgtatttcagtggaaaaattttggatctagttcaaaattgaattaaatgctactacctcagtccacaaaagaatgcgattctagatgcattcttcattagcatttctaaagttagaccaaatatatagataaaactattaatgtttatgacaacaaataggatagtatgaaaatatatctcatgacaaatctaatgatacttatttgatattataaatattgatatttttttatttataattagtcaaacttaggatactttatcttggtactgtgctagaattgcattcttttatggatggacggagcatagtcacaaagtttctgggtcgacggggttgaggaacgtagtgggctacttgcgagacatttttaccctgtgggtcgaaaatgaacctgcctacctgagtcagggtagacgaacctgggtcaagggtcagctttcggacccattttatgtgatatgggagggagtacattccaacaaaatagcactaatccaattatccaaactccctgttcctgttgatgtagagcttgttagctaaaataccataccaaggaagacagcagtcttacctttctttaaagaggctcattttgtttaattctcttgaataagatagggtgacaaatcttttgatgcaagcaggcagacaaggcatccatgctggatgaaataattgattatgtgaaatttcttcagcttcaggtcaaggtatgtctgtgaacagtttttgaatgtagccatgtaacttttctgcttaggcgaagatgattaacattcttcccttttacctggtttaattcaggtcttgagcatgagtaggctaggagctccaggagcagttcttccccttctcacagaatctcagactgaggtgccaagccttcaaattttctacaacttgtatgaatcgttgaaaaagtattgttgttttataattggtgatatagacttcgcatcttattcatttgtatgtcgaactacaatgcctcagataaattcagcaatgacatgggcacatggcatgatagcagtcctttagttccacttgcactgtagctgagcttgatacagatttgcttcctgctttaaaattgagttaccagtaatttacttcaatctacttatccatgctgtgcactgtcatgattcatgtagggttaccatggtcaacctctgtcggctccaaccaacacacaaggattactggatgcactagactcggaagacgccttcgtctttgaggaagaggttgtgaagctaatggaaaccagcatcaccagcgcaatgcagtaccttcagaacaaggggctctgcttgatgccagttgcccttgcttccgccatatccacccagaaaggtgtgtccgctgctgcaatccctcctgaacggcgaaataaagacatgctcctcccatgagcatgaggacacaactgaagaagacagagctcagacggctgaagaatgcagagcccgtagagtacaggataggaagttagtctgaccagagtgcatggccccgtctactaatttgcttctcagaatcagttttttcgtacctattgcgcatcagttggttttgccttttttttcccccttttttgccgtattgcatcaggttgctcagcgatagttgcgtttcagtaacttgaactgtatctggattatctatctggtttctccttttgtgcatagaaaaaaaagtaaaatctactgtttctggtgttctgctatatgggatctttgatcagacatatccaaagtgatcctgtgatggtacttggtagggttactgtttcttgacgatgatagctcttgcccggctgtcagtttgttagctgttgccatctccgtcagtttcgaaggatgtgctgtaaagtgttgacagggaacgtctgcttttgtttaacagaaatctctttatcggaaaatgatggcgtttgggttttggtgcagtgtttaagaacctgccataacaacaaacctcagagaactgaggactgcgatgaatgtgaatggtggttaaggcagagaagcactgatcagccatttagtctactgttccgaaataatagtgatctctaaggggagtttactcgaagctcgttagctcactccgctcgtggctggctcggcttgttattttagtacagtagctataacgagtcgagccgagccaagattttagctcgttagctataacaagctaactcgagttagctcgcgagccaa

SEQ ID NO: 5021 - DNA, 7078 bp, Sorghum bicolor
ttcattatagaagttttcttttgcttctagtagacattgcatcgctttcacgagtcttccttctggtgcacgttgcacgactttgtggtgctctcaaagattgcttcttctttgtttgaggtgtaccctatgtcttctctgcctttgcctcccctttcgcaagcaagataacaatttatcctgaggtttgcttgcttgccgccaacttaatccccgttaaggcggaccctattagacaacaacctcattagccttgcaagcacacaaggtcggcctttacgacataagcactagaataaagccgattaatcaccagggatctctccgagcctccttgattttactagagttgctcttatgaatatcccatgggtataggcataaagtccctcacaaagccaccgatcggagccctcgcacaatcaccaagcgatactcaatgatccaccacgacaccaagccatctagatggtgacaaccaccaaagagtaataagagctccaccatgagaacaaaatctctagtgtcacgagatgcaggcactcaattgcagtgtaatagatcctctccaacctcacgggaatgcgatcagaaagtgtgcaagtgagtgggaggtgtttctcaaacacaagaatatgtaggtatcagcccaagtgtccaagagagtggccaagcttggccaagggggctatttataagccaaacattcaacgggtcgttcgaagatactgcacagaaagtgtatgcaccagagctcacaatggagagcctcaatggtgctcttaatgattatacaaatgaaaatactacagtacctataatttttttcaccccaataaagccaatctcaatggggagtttcatatcccaatttccaacgcatctaattttggaaacaatgcagaagagttttatggggatgaaactcactctgctctcatgaaactcttatcatctcttatttcattaatacagtgccacatcagcatatttaatgcccataaaactctgatgaaatcacaatgagaccggtctaactaaacaaggcctcagacactcactatgctctcgtctaaaatgtcaaaaacagcacctgcaaattattaaagaaaagcttactaaaattcaaaagttgcattgaaatttgccaacctaacagtgttttcttagcttttcaaagcacttcgttttaacaaacaatggtcaaaataggagcgaatattactattctctttattttaaattataagatgttttaattttttagaaatattatttttactatatatctagacataatatatatttaagtgcgtaacaaaagctacgtatttagaataaaaaaatatcgttcagtttgtaatgaggaagtacaataaattatccaaattcatattatagaggcattcatcatggataaaaaatagcctttttgtgtggaaaggagcactcgacgtatagcacgatccaattatggtacatctctacgtttagaacttagcaaccatgttcctcaaagagaatgagaatgtggaataagaactagaacttgagacgatatttgtgaaaatctaaatatttttagaacaactttttttttttcagaaaggaacgtggtaatgtttcacttttccggttgctaaggttaaggccatataaaaatgatgccaactgaaactcaatcgagagccaattgatgaaactcaaatgtatcatcatcatctgcgaaaagaaatataaaggagtggcttgagcgttccgtttttttttttaagaaaggcaaaccaaccacataaactttgcaatgcaacacgcatcacaagggtaaacaagaagtttccgttgcaaagcccgccccgttccgttgagaacgaggtccgtctccggcgcctccaaagaccaaagtcccacagcgccaaagcccaaaccccctgtgggcccacgaccccatcctccatatacacacgggcaacgcttccggctcgcagccagcaggacaccactcatcttcttcccccccccgcctcgtttccatcgccgccaccctctcctcctcctcccccgtcccaccccctcgccgccgccgccaccgccgtcgccatgcagagcctcctcctgcccaccgctgccgcggccccggtggcggctccgcggggccggcggagtctcccggggcgcctctccgtgcgcgcctccgcgacggcggcagcggcgccgcggcgggagacggatcccaagaagcgggtggtgatcacggggatggggctggtctccgtgttcgggaacgacgtagacgcttactacgaccgcctgctggccggggagagcggcatcgggcccatcgaccgcttcgacgcctccaagttccccacccgcttcgccggccagatccggggcttctcctccgagggctacatcgacggaaagaacgaccgccgcctcgacgactgcctccggtactgcatcgtcagtggcaagaaggctctcgaggccgccgggattggcctcggctccaagcccatggaaaaggtagctagcactggaaacacacctcggactgcttttgttttaaatgctgcacttttactaccaagtagagctgtcaattgcctagttacgttgtgatctttccgtcagatataaactgtcctgtggtattgcgccttttgataaatcaggggacgttggttggttcattgtgtggtggtgactacaatttccttttctttggatggagatgtgatctccggggatagtgagattcgtgaccttgatgggcttagatgcattggcgccgagtagtggcaggatatgccatcttagcttggcccgaggagtagcacttgtgttcagtctagactctgagattaaccatcttgataacacatatagatatcgtgcggcaagaaataaaatgtgccatcctggatgatcgaatggagtttgaagttgacacggttcttctgggttttcaactctttggtgcatagtaggggaagaagatgaagcttttcttagggatcggagttggtgaatattagtatttgtttttttagtgctagatactgaaataaggtgttttggttgtaaatggtctctgaattaattcttgtctgactcctgaactggggagcattgcttaatctaaagagcattatgacatacattttcagcagcgaattgatcatgtctggatttgtgcaacaatgctaagttttgtctgtttggctaaatgagcacatcaatttacattgcaaccgtggtgtcttagagggcaaaagggcaaatgtcttacagttagaatggtatttttggtgtggtatctgatataaaaacagggtgactcttaagagcactcccaatgcaagactctatcatagagtccaagacaattaattacatattatttatggtattttgctgatgtggcagcatatttattgaagaaagtggtagaaaaaataagactccaagtccacattgttcgaggtaataaataactttagactccatgatagagtctgcattgtgagtgccctcatggcatagataataaggtgtcctttaatgtcactcaaagccaattatgtgtgtattggaagttaatattgtgatgtgagtaacatgccttcggttggttcttactttcaaggtaaaaaatggaaagattacataaatcatgtctgctacagtgccttttgaaaattcatttaaacttagttgaactcagtatgatatatttgtgactagtcttaactgaaacaaagtagtagttgtactgttgctttctaaaaagcagaggaattttcctcctttaaaaaaaaacaaagtagtagtttaattaaaaagaatgattgacacaacaggtttaattcatagtaacatatgaggtttgcgaaaatctgttgtttcattcgatgattcaattgcattatggtgatttttctagcaaaatattcccttcttccaggcatattgttgaaggataatgtcatcaaaagtatattttaacctttattttgtcttagaatattgtcaatctctacaaaaccattgtcgttttaaaagtagttcgagtataaatctattgttgtaacttttgtaccctaagcacagataatttgactagttgttggtcaggtttacagtgtttgaattcttcaaaataaatcccctacaggtcagagggagtagcatttttggattatatcaaattattttctagcacatcaaactttagtttgtacagtgtcgatagtagtttgatctgctagtttaatatttttactagtcctataatattttcacactgttgatacttgatattacattttgtgctaattggtaaaacattctctccgacagattgacaagacccgggctggtgtgcttgtgggcactggtatgggtggcctcacggtgtttcaagatggtgttcagaatctcattgagaagggatacagaaaaataactcctttcttcatcccatatgctataacaaacatgggttctgccctgcttggaatggacattggtttcatgggtccaaactactccatctcaactgcctgtgctacctcgaattactgtttctatgctgcagcaaaccatatccgtagaggagaagctgatataatgatagctggtggcactgaagctgcaattattccaattggtgttggtggctttgttgcctgtagagcactgtcacagaggaatgatgacccgaaaacagcatccaggccttgggacaaggatcgtgatggttttgtcatgggtgaaggagccggagtcctggtatgatatattaacattatctgatattttgttaagcctataaactgcaattttttttgtttaacaatttgtgaagagtaacttccattcagttctaatgcacccagggtctatctctgctgctctaatacttcagttgcgatgaatgttttctataatctatattgaattgataattcatcttctgccttgtatattcttatggcacaatgataagatgtttcatgcttgtcattcctttttgccatggaattatgaattttctatccattaattaatattctaatttctagttctttcaatcaatttggcaaaggtcatggagagcctagatcacgcaatgaaacgtgatgcaccaataattgcggagtatttaggaggtgctgtgaactgtgatgcttaccatatgactgacccgagagctgatggtcttggtgtttcatcttgcatcaagcaaagtctcgaagatgctggtgtggcacctgaggaggtagtatgaattttagttgttaaaaatacttcttcatttcatatttgttccattatgcttaaccttgtctgtaactctgtactttctagagtgacagttgtccatgattcttaaatagtgatccatggcatggttgtcacacttttggttcagatataattttcactcatctagctggcatgtaactatacactgtaaatgccaattccttgtacatttcacagttatatgttttgccttgataagctggttctgacttcgcgaatcctttgaggaatcttaagtaaatggaacacttacaaactatttgcaggtcaactatattaatgctcatgcaacatcaacccttgctggtgatctggcagaggtgaatgccatcaagcaagtcttcaaggacccatctgggatcaaaataaatgcaaccaaggtatttcagcttatcaatattatttcaaatatttattcatatccccttcctgatggttgatgtgatcttccatttgcagtccatgataggacattgccttggtgcagcaggcggtttggaagccattgctactattaaagcgataactactggatgggtgcatccaagcataaaccaatttgtaagtaacatcacggtaattttagctatcattctattagaatctgtttgccactaaatctgagctacattctcttttgattacagaaccccgaggaagctgttgaatttgacactgtacctaatgtaaaaaagcagcatgaagtgaacgttggttggtatcaatttcaaggcacattaaccccccaaacaaaacctctctctcttatatttgtttgtattgccatgcaggtatctcaaattcctttggatttggaggtcacaattctgttgtagtatttgcgccatttaagccataaggtgttccttgcctcacagatcttggtcagaacagtggagatcttttctagggatttctgcgttcagttttcacgtgttctctttgggggaagtaatgtcagatttgagccagcaacgttacaaatgaactaaagctgagatacattgcattttagataactccatgttcacttagattgagcgcggttgtacaacgttgctttgaatcatttgtaattgattgtactgtttttcatgtaatggaagagggtcctgtagaagcacatctggaccttctagttcaataccatacaaatgaattttcagggcaggaattgtgtccctattgctgggatcttgactcttttatttgtgcaatcatttttttgaaatggctataaatagatacatacacgcgcgcttgaatgaaacgtgcactaaataaatgatgcaatatcttcaatatttttcctgggtaagtgccctggttagctcttggctaacttggtttcttcctattgtaacactactacaaaaataattttacaagatactgcccaaacattaacacaagcggtaacaaaatggagttgtctcctaaaatacctaaggatttatggaggcggttacaattcattataccatctcacaaaatgtattcattataccatctcacaaaatgtattttcgaagacagacattttatttaaggaggcagtcaggattgaccatcttataaaatcaatttacataggcagtaaaaaagtgtccgtctcaatcctaaaattgattttgatttatggagacaggcctcttaaaaggttggcaactgaaaatagagataatttccggaggtggaccgcctccatttttgatggccgatcgcttatcagacccgccttgat

SEQ ID NO: 5022 - DNA, 5099 bp, Sorghum bicolor
ggcaaactataacaggaacatcaacttccatacagaactgattttgcgagtataagtcgtctggataccatacagcgattttcaacagctacttgacaaatcggcacatgaagttcatcatgaactctcttctaaatgaaatatgtgcttaggacagcatgaagaacagactaattgcactgggcagtctaagatggcacgaggtaattgatgaaagcttctgccttaggagccaaagctttaatgtcctcacgtgttgcaagttcattgtcctcaaactggaacgctggggcgcaggttacaccaacaaacgaataatgcagttcagggtctcttccgggagtcttgacaaatacacttccatcttcagtaaaggattcaatgtcgcaggtcaagaaggccccaaaccatatgtttggaggaactgtgtactgtggtctctggccctgccgcaggtcaggaccaacgacagtcgtcttgatttgtccatcatcatgcacctcaaatacctgaatgaatggatgatctgagcagcgttttaaagaatcagatgtgtcatttttcagataagtttacagaccgtgagaggttctcctaggtagtaatgccaggtttcagcacaagggatacggtgcaacctagcgatctccccagcaggcagtaggaaatagatggcactactcacggcacggtcaaccttatctacaacgattggaacataacattagtgaattagggaaaaataatgcagacaaatcaagatcaaccatgggtacaatcaaggtttagtagatatgctcagcaagtcaagcatctttatagtttagaatgagcaggatccagctgcaaggttacatgaaaacttgttcaaataacaggttactgatggttgatgccaatccttttaaccatccaatttaggggcatggaaatcatacatggtagctcctataagctataaagaaagtaaggatatcttctaattgaaaagaacagcaagcccataaaaacccaaacctcaattttcactgtaacaataaggtatgactgaattttgaagttaggatcacgatcaagtattattctagataagacaagtgtcaggaaccatcatgaagctattggcagcaatttgcatttctcaatcacttggtagaacctgaattactaagtgcagaactaaatgcctaaagaatctgcagctatgccatagccaaaaaaaggctcatttggctgtctttccaaggactaaaccattttgaagatccgaatgtgccactaacagttcacgcggcatcagatcatgaatttatctgaacgaattcatgccacttctgatataaactaaacaaactctgaagcatggagctctagaaacaaatccaccatcaaacaaattgccaccctaataatccacaaaacggccaccggctacagctacttgcaacaaataaccaggtatccacccttcgtaaatctctatctctgcagcaaaactagatctaaacaaaaggaaacttgaaaccaagatagctaggcaaaagcttaaaaaactggggcgatttatccaagcttacagcggggtgggagaccggacgtggggagtgcgattgaggggtcacggaaggtctccaggtagaacccgccatcggggtggcgctgcagatccagagcggcgacgatctccgccgccgtcttctcctccgcggtcgagagcgccatggattatctggctgctgggttcttttttggagtagtttgctcagctcaggtcaggtgtctgataactatccagttagcttcgttaagccgttgagctgcgacgagactgcagaaccaacggccaggatttatccatgtgtgaacatggcctgtctcgttctgtaaggtgtatagccacgcccacgcagagggagaccagaaaagaaccgccgccccccccgaccagaccaatccatcgccaccgcgccgccctaggtcgtcgccacctcgccggcaacaatgtccccttctgccatcttcgtcttcctcctcgtctctgcgctgcatatgctggagtgcatcctcgatctcgtgaagagggtcggtgccaactgccaagaaaactccgcgttttcctctctctctctctctcatcttgttcaagattattcttttggggagaaatatttgattttggatgaattgaggtcgttaagaatgaatcttcacgggggggattctgcctccgtgattattggatctgccacctactgcaattccgacattttttcagctcgttctgttccattaatgttgtcctgacctgttgatgttccagaggggatccatttctgatgaacagctcaaactgcgtgtacagatcacggaacttctcaaggaggctagtgctttgtcaacgtaggcaatccggatgctattctcttatgaatttggcgattctgatatacagctgttgttgaaaccttttttgtgctgcaggccctcaacgtttgcgcaagccgcaaaactgaagcggttggctgctgctaaagagaaggagttggcaaagagtaagtgttgaattcctcagacagcgcttgggttcttgttgttcttgtttgagccgattcgggcagctgaactatttcttttgttcattttttagtgcaagagctgaacattaaagggaagcagtctttatatgaacagtatggaaaagctctgctggccactaaggtgcttcatgattcgtgcagtttatgctctcaactatttactatatacagtttgaggagtctcatcaaatctgcatgctaggttctaatctatgttgtgttcattctgtggttttggagtactccagtaactactgttcctaagcaccttctccagcccttcggtaagttaatgcccttcacttcacctagctggcaacttgttctgcagccttgttaatttcctggtgttcacacatttcattgtattagtttgtttatcaaactgggaaaattgtttttttggtaacgttcacaagataaacccaaaaggtaactatatgcctccagtggaagaaggatccgctaaagaaaccatgttccccttttttgtagcttccagtatgaaaatgagctagatcaggagtgaatattgtcatatacttatattgtactccttttggataacaaatgctgacgtttcagacaataaaaaaaatgagttagcaacctacatttcttgtctggagtagttaaccaaaggttcccatcctgaaatgataagcatattttatatagggagagtccactttttataaattttgaccaagagttattcaagttgtacacaagcttatgatttaaaactttcatccagagatatgtggtcaaagtgcgtttgatattggttctttagcaaacgataacattttgtgagtgaaattaagggtcaaagtctattttatttgacttttctctgatcagaatatgcttatcattcttggaccgaggagtactgctgtagatttgacctgatattaaatatatcccatttttgtttattgaaactaattattatactatacaatcataagtcatccggaagtaatagtttagagggaattttcaggatggatgttttcctggagaggtgtagatgcttctacaggccgtgttgtggtgagtaccgctgaacctccatgtgtttaaatgttcttggctttatccttgttaaaaatagcgccatgattgaaactgggagtcactactcactgaacaagataaacagttaaggttgccaaattagacatggtgatatctaatttctaagttctaataagttccaaatggtgcttttttttctcaaacatgatggagaattgggtgtcaatgggcattaagaagaaaaatagttatgttccggtttcagggtctgtttagatgtgctccaccaactccaatatgatgcagctccacaaaaaaacttggagtttctgaagtagtatctctttagatgctccacaaaacaactgctcaatttctccttttttgtagaagagagtttgtgaagctgtatttgtttaactagcgaagttggaaacagaggaagatagagcagaacagtcccaaactagttacattgcaccgtgaacaaatttgattactaacaaatctccggtctaataagccctagtagccactacattcattgtgagaatcatgtgatcgagtctttccggtgaatctttttgttacatgatattttctgaaacaatttttgttacatgatatatcctctgacaagccaagcatattttttgcaacagtaagtctgggattttttttcagaaaaaatgtagttacattgccgcgtaatatctcattgtgctgatgcaggttggaattctcccatggctatttttgacctctcatgtcagcaagctactgagcgagaaacttgcgcccatatttctgcatccttagctcctcctaacgacttacttttgcctctgtttttgttctgcagttttgtatgatctctcaatccatctacatttatgtagtttccaaagggattgggatttttgtaattctataaaagtaacgagtagaatttccactgtgtagccgttcctcatacattttattaccatcagaaatgttccaagatagcaactccttaaagtgattaatcagaggtagaaattcagctacataagactgaagtcgccactcgagatagcaacaatattttaagaaaacaaataatttagtgataaatagggtggatctagagcccggactaggttgcagcttgggtccaaaaaccaagtagcaccaaatagtactattagtttttcagcctggtacatgtaaagaccccaggagaaatgataatactatgactcagatgttcggacagagtgattacgttgaacacttgtagcatgtgattagccagaaacccaccaactcactcgctgcactcctcccctcccgtcgccgacactcgcctccatggtggataagcaagtacaatttttaccaaagtctctaatcctattacaatacagaaggatataaagaggttggactgttggagggtgacaaaatggatggaaa

SEQ ID NO: 5023 - DNA, 13739 bp, Sorghum bicolor
acaaactgtcctcaagaggtgtctcttcaggttcgagatcaggaagctctccaatacggtctattgttttcttaacaaggagatcagtctcttgttgcttgttatcctcatagtccttgtctgttaggttccaaagattcttctcaactgcatcatagaccttctagacaataaatccagggtgctgccgactgagaatctgcttgtgctgagaaataaaatggaccacaaatttgtttttttaggaaaggaccacaactttgtgcataactgattctgcaggtacatcatcaatgtgaaaactgtaaaataactcccgtctcgtgctacccagcatccaccctcctttttgtcagcctcttccggtctataaaaccatcggccagttacatataggctccactcagtttctgttatatcctgtttgaagataattaaaaagatattataatacagaaaatgaaagatgaaaatatcaaataccacaaaaaactctagcacataggatactgtattgtaaaagaaggaccactatagtagaagacatgttccagctgtacaatgacaggagactttgtcctcagcactaacaagaacaggtaaccatccgagtcatccagtcataggaaataaggcaaggctgacattaaacagcttgacataagggttgttcatttgcagttgcacccatcgcagtaaaaaacccaaatccacaatgacgcctagcagcaaacacttaatcaatgttcatgaaatgagttaactatatgatgtccagtttccaaccattcaagagtaacacttctaatttagttgtagcaaccaaatgcagggaacaatataagttataaaaaagggatgaataatttatgcaaaaattagtgaggtcgcagaacaaaacagttggatgcaaatataggtgaattacagtctataagcacaatggcagtatgaaaatactgtagccaaaacctagcatgatctcatatttcatagtaaaagaacatgtctatcttatactggtataaagactctagtcacctatcacacaacagaggcatcaatagctaccaacccatcaagtttagcgaaatctatgaggctctacaatgaatcgagtgaaatttcataaaagtaaacacagtttattcggcaacgtttggtccctgatacgatcaggaaccttgaggatggcgacatatggcttctcagtgttatcctcaggtgtgagcagcacgggtcctcttgcacaaatgagcccacaacaatcacccaacggaaagaaaacaatttgtgcctcccgaaacaccaaaaatccaaatagagcagaaattgggaagcgagaaacagaggaggaagtggcttatcagctcgaaggtgttgccctcgtactcaaaggaagcttagtgcttcttctgcttcctccccttgccggtggtcttgatcgggtcccctacacctacgggcaccagcctccgtgttctcctcctctcggggctcctcctcctcatgcggctccacctcctcaggctcctcctcgctcttcgggtcgcggcggcgcttgggccggtgggaaagagaagagatcggaagccaccgctgtgggatgggacgggatggtttggtttccaaggaggattcagaagatagagatcccggcgcggatgggtgggcggacgcggacgggcagaaaaaaccgatggcagactgaaattttggcaatttattattaggtatagatttgggctatactctaccaacagaaaaatgaggtaagacactctttttgagtgtctttgttgttagaaaaaaaagaagaagattgctcttactgttggcctaaaataaaaatatctctttcgaccagaggattggacaagtctatcataaaacgggctggagcccaaatcaattaaccagaaaggcccaaactgtcattcccagcccattattcagcccaagcaaaccggtcagttggcgcctggctcccaccggctcccatgaagacggagatccgggtccacccgccacccacccacatcacgtcacgtgaaagcgcggtggcaaccgtcttctcttcggcgtgtgtacgtgttgccaagggcgcctggtgggcccacgcatgacccgcaacacacaacgcgtcgtgtcgcttctcctgcgaatattataactgactcgtgggacccgtagacacgtagagacgtgaggggccacgtatcagtcatgcatcgtgcaacacggcccgtgacccggcgcaaggagaaacagcagcggaccaggtatatcccctcccgaggaaagtgctacggccacgcgtaccagctcacggccatgtgggtccgtccagtcagtgactccgtgagctgggtacgggtgcgcgtagcggcgtctcggaaggcgcctttctcgaggtgggagcacgactcccaggcccagcccactacgagggggaagcgacaagcgaacgggcgctttgatttttacagaagcatctctctcctcagtcctctttccctctcgctcccggatctgaactcccccgaaaaaatcgtacctgagagaaaccctagcactggaggttttccgccgtggcgcctcgccggagacctccgctcgccgcggccgccgacgcgtcgccctcgtcatccccacggaagtccggcgaagatgcgccgccgcccgccgggggcacgccgccggcggcggcggccggcgtcaccccgtgcgagcaggccaggaaggcactgtgtgtgcggtcgccgtttgacggggaggaggctgctgggcgggacgcctggctgccatcccgagttgccagatgggcggcggtgggcgacgtgcggaagaatcataagaagagccagccccagcagcagcagcagccggagccagcacctcccctggagcagcaccccagagtgcctgctgggtgcaagggcttttgggagcagttggagccctattttcgggagttcacagcggaggatttcgaggaattagtgacgaagcatcaattctgccccagccagattgatccatattttgtgataccagttgtgggcagtagtaaggagttaggggagaattcagatctatctcatgcttttgaagcagatgaaagcccagatttgagttcgaatttggacaagcataacgagttggataggagcaaagaggatattcgggacagcttggatgatattggagccagtgtagagctggtcacccaagatgagagtagtaaagagaattgtgatcaggacatgcaggaagtgattgtgcagcaagaggagcagccggttgaaatcgtgttagatcaaagcaggactaatagtaatgttttaccgggatgcagagaggatctgttgccttctttgagctggctcttaggagcaaggcgacggtttgtgctcacttcagagcgcccaaacaagaagaggaagctcttaggtgctgatgctggtctagagcagcttgttctgctgccatcccctgaaggtgaggctggttcgatctgcgatgtttgttgtatgggagaaagtgacatgatgtctaacaggatgcttcattgcaagaattgtgagatatctgtgcaccaaaagtgttatggtgtgcgtgttgtgccagatcgtttctggttttgtgtttggtgtagccggaatatcgggatgccacggaggttgacacgcagcgatgcctgcaggactgtgccaatgccctgtgtgctctgtccaaaggagaaaggtgctttgaaacctttcaaaagggaccctggtccatccacagatggaggaaaccaagaatttgtacatttattttgtagtctttggagaacagagtttcatgtcaaggacatggaatcaatggagcctgtcaccaatatagtagatacccaagagaatcaatcaaaattggtgtgcagcctttgcaaggtcatgcatggtgcatgtgtccgctgcagccatggtatgtattttgaacataatcactctgattctaacactaagctacattcatcacctctctgagaactgaagttcttatatgcctgaatctttaatataagatatggtgcggcacaacctatgacattataagtcaatgtccaatttttgtgctggacatcaagactctacctctatttccccccctaatatggcttaagctgcaataattcgttctcattttctttatttattttctcttgtcatacccctgtttcacttatttgaaatcttataaaaagtgaaatgcagccgcacaccttgaacttgtaccacactaccacagtgtcttccatgtccttaatttacatatgggttcctaaactagtcaagtgtgtcatttgtcaatatctaaatcttcctaatcaagcatgtaactgagaagaaatatcctaccctttttaagagcattttttaaaaatatattttggtgtcagcattttcttgattggtgtcctatcaacatgcctctcccattgccattgtaagccaaagccatcaacatttggatttaaccatatttgtgaaagagctgacattcaactatttgagttatgttgcatggatagttgcacttgaatagacaacctacttagtgtttctcattaactaatcagtatgcagttccaggcttttagggaccttgaggacatgaatcattagaaaaatatactgacaactcatacaaaagcaaattgatcaatgaaaaggaatttacttagttgcacagaaccagttaaggtctatgctatcatgttggatattgttggatttcacaaatggtcatgcttagtgaatctttttttacctctccgaggtcctgtggcaaatctctgttatcaaagttagcatgcaagtcgaattgatttattattgatgaaggtttggcaaataaattgtgattccttgttcattgtttctgtacaaatagagctctacatgccttctagatctagtgttttctaaggtaaaccttctataaataaggatgtaatttattttggggatgatcgactagttgcctgggaggagtctatgcactgcgacactcagttatggtatttctgccttttgacttggtttgttccgggggggggggggggagtcagcattgtattatgatgaataaacaatgcgaagttacataattgacttgagaagcttgaaaggtacaccttgaaagttgtaaatagcaagtatgtttattttttttttccattttttgccagtatttaaggaaagcatcacattaatgaatatgtatttgaagtctactattttgtcctttttgtttgaaatcgtagagccgtgacgtcaacatcttttaaaagttctatggttaatatgttaatagcataaatattgacagtatgataattgcatgaatagatttttatttgaaaatgctttcacaaaagtataattccttgttagtatttatggatattaagtatacaaatcagtgttcaaagtcatgttttggtgtccgtgcaatgccgaaaacataaaatgaaatggcgcatagggagtattctgtagattgtatctgcgcaataatagttctaattttataatccattcattttctaagttcatgcggtttttaggagcatgcaggacttccttccatcctatatgtgcaagagagttcaagcttcagattgagatatgggggaagtttggtcatgataatgttagttcttcttcttcttattaaatctgttcgttatatttgattgcttattattaatttttcttatttttaactgttaataggttgagatgcgagcattttgtgcaaagcattctgctatcaaaagcatcagctccatacagaatgacaaaagtgtatctgaactggactgcgctcaagctgagccgcatgatggaaaacctgttactgggaatgaacaacaagtgagatttacgcgcagtaacaaggacaaatttgtgaacagcacatttactactagttcttgtagcctaaacaatgctcagacaactgaagtggctaccattccatccactcctggaagcactcaagaaactcaaagtgcagatatggctgttgatcaaccctctgcagatgtgaatattatgagcaattctggagatgtttctggaatgcttcgaaaggtatttgctcatcttacatagccagattagggtatggaggttttgtacctgactgcattttgtatatttgcactgacggcacagctagttgaccaaggaaaggttagtcttgctgacatagaatcggagctgggtctttgttcagaatcagtggaagctgctcttcaggtaatttgttgttgattttttagtagttctcataagttgctcagtgtttctaccagttgtgtgccgacatgtaataattggtacatacatctcactcaatttatcctagcacaagctggtggtatatgcatcgcttttgaactttcacatatagaattaatattttttccacaacttgtcaactttttattctttgtgtaggctgcttatgtctttttttaaatatataaaaacagagattttaaatgtgtatgttatagtatttgaaaagtcttatgtattataacaaacattacaagccagcaaaaatcttcaatgtagatataaatagtaaagatgattctatactcataggtataagtttaaccataagtatgcatagctctatggtgttattcttgtgtttcacaatgcgatgctactatcgcccttgatatgttttgagaaaaaacaatgcgcctttacagcctgatgagacaactgcttactcccctggcctgaagttgaaaatgatcaagtggctgcagaactctgagcgtgcaccttctgttcaagtgaagtcatttaacgagggttctttggcacaaggtaataaccaataatgtttcgtcctccattatctgtaatactacaatggctgtgcgcctgtatcactgtggccatgttgtctttattttgtattttgtctggatgaggtttaaagtgcgttgtacatagtatgcttcctgatatgaaatttggctttaccaatttattctggatcatatttgtgtctcttgtagctacaatgcttgatatttatgggaattctattcttttattcaacaggtcatgactgaataagctaacatttgccaatcattactttgtacagcctgtctaatatgtgatacttaggctctgtttgtttcagacaacttgtgccttttgcctcagcagaaagctgaagcaaacaactagcttttgaaatcgccttttgggaagcaacacttcatttttattagaaatttagaagctggtctgtaggaacttatgttgattctaagttctaagggatgttaatctgaggggtattacatatattattatacatttcaagaaacaggttttctagaagcagtggcatcatttaaaagccagtttttgaaaagcatcagcacaaaccaacatgcccttattagatatgatgccattgtttattagtgtggcagtgctatgttttgatctatttgctttagaattttcttgctagtgttgggcatgcaacctgcattttctgtttcttttttttaaagaacttgggagtcaagcatctgattatccctttttgaggattaaactactccagggcaaagaagcctcaatttcattaattttatagacttgttgattcttctggtatttatgaacaggtacacttcttaggagtgaaagtaagaacttaaccactgctacacttcagtcaggacaggaggaagccatttcatcgattgatcatcattttccagaaaatgacagtgctaataggggtgatttagttcaaaatggctttcatgatgatcctggtgcaaatgagatttctggccggcatttactcaagtatgcttacccccgatccggatgtgtctttctctcctctctcctccttgccccttcctttcccctcttcctctctcctttatgggcatgtgtgtacacaggctttagttactttgttacactgggaccttctcacattattataggcagtgtttcatttgaatggaataataacttaatccttctttttccccatgtagcttggatggttactgctgttatattcatcctgtcattgagaaaaggttgcaaggtttgtggagtaataacatggagcaaactatacagaaaaatggttatcatggtaaattcctgctgcctccttcctgtcaattaaacagaatccattgctagtttcttttttcacatcttaaaatcaactttattttcttccaatttgagtagaagagttatcttgctctcttcaagatgaccttggtggttcatcaacaaaacttgggcaattagcagacaaagctgccctggatcaagtctgtaaagcaaaatcatcagatactctcaagcattcacctgatgatgaaatagaaggggaaatagtttatttacaatccaggctacttgatggtgttgtttctatgaagcagagatatggtaagtttttctttgtcatgtacattaatattccttatgcagccatacaatatggttttggttgttgtccgctttattaattcccctgctgctgcagtaccatcttattaattagtcttcacagtgctaaaatgaactgcttagatgtgtttatatttcttcagctttctgaatcgatatttcagtccgtcttatatcttgcagaagatttaatactcaaggttgtccagaatatttcttgcgagttggattcttttaataaaagaaaatgggatcatatcattgtgaatcagtttcttcgtgatctgagggaagctaagaagcgtggaaactcagagaggagacacaaggaagctctagctatcctggctgcaactgcaccttctgttgtaccagcctcacgaaatgcaacaatgaggaaagagacagaaaacaatgtggcctctgctagacgagaggttatcactgtgcttggcttgttcagttgattcttctcaggcatgatctttttttattgacttctgtttgtttccagattatgccaagaagcaatgctggttcctcaagaattggccaagtatctccatcaccacaagcaaaggatttatcattttccaatagcaaagtctcagaggaaactaactttggcatttttgatctggcaaaattctccaagaaaagttctcttccctgtgatatatgcatgcgatgtgatactgtattgaaccgtatttttgtctgctccagctgcaaggtgatctgcatgcactgtttttttgtcccaaataaattgcactccatcaactattaactggcttcataagcaggctgctgtccacttagattgctaccagagccttaagtaccccacaggtccatggaagtgcgaactttgcctcgagatgtcctcagattttgttgtctctggtgagctatcagatcaaaatggcgcgaaagcttgtttggtgcagtgtggtttatgccatggaacatctggcgcttttagaaagactgtgaagggtcaatgggttcatgctttctgtgctgaggtagtgatttctagttttctctttccatattggtgttttgcttagcttatgtacatttattcatttaagttaaattaccccaactttccttagtggctgttggagactacattcagaagagggcaacataatccagtcgatggaatggtactatcttgtgctagttatgctcttagtatttctgtattgttaaataaatatatcttctttcatatttattttattataatgcatagttatgtgatcatatcaccagaagccatcttgagtacaatatgactgaattctcttattattttgttctgtctgctcgaacctaaggagaggcttcatcacaaggataaagatgcatgctctatatgccaccgcaatgtcggtgcatgcttgaaggtttggtttttaaaaggatcctttatacctattgatctagaaatgtagtgaaacaaatcagatcttgctaaccttctctctttcaaccatgcagtgtagtacagtagactgtcaaattactttccatccttcatgtgctagagatgctggtctttacatgaatacaaaaagattgggtaatatgttacaacataaagcatactgttgtagacacagtgttgagcagagaaaggtaagaaatactttaaattgtttaggagggttggtgtcttcaccttgtaactatatttgtatccttatatgtcaaacatccttctatggaaattcttgcaggcctatcgtcaacaatatggacctgaggaagtcaagagtatgaaacaaatgagggtaaacacaccacttgcatactttatctcctgcaaggatcaatattctgcttaaatcttcgtagattctactttttgttttttgttttactaaggtagtactaattttagactgccaatcttttcatggtactttgtctctgtctcatcatgttcgctgtgatgtttgtaattcatgtgcgttttgtgtcaaaacagctcttggctctcaagtcttatttggttcgttagatttaagtattagtgtcatgatttgcaggagcatcagccatggtgaaaatcattataggtattaagcagtgtccagcagcctgtatttgatgaatatttatgactgtcgtagtcctaataaatggcagatatcacaatttcacatatgaagacaaaacttcaaatcttccatgtttgtgctttttacctttgtgtgacctttgaacatttcttttgagtatatttgtatggagacatgaatgccaaaggatgctagatcagttggtcttggcactccggcggcatctcccaggtcctgagttcgaatcccagtgggagcgaatttcaggctgggttaaaaaaatttccctcgctcgtcctcataccaaagcactggggggccccggcccaattctcacttgggcgatggaaaggccaccgtgtatggatgggagtgggggttcaggggttttctcaccggatgagaaggcactttcttcttaatttgaaagctgcagcggcagtcttaaccgccccggtcaagttttatgtggacatgaatagatttacagaagcatcaggagcattctaaaacatctaacctgacaagttgtaagaaacacagaacttaagttttctctggtttggactttgataatgtttacaaaaaatggcttgatgctatttcttgctgctgatcagtggtttatagcttgaagatggtgaagaaactcttggatcatattatatgcttctgtttttctcattcttggcaggttgaattggaactgttacgcttcctttgtgagaggattgttaagagagagaaagtgaaggtaagctgttaattgtgtctatttctgcacctttggtttctcgggatgttcaatagttctctttcatacgttactttgtgataacagcaaattgtgataatgtactcatccttggagtatgtttcccatttattttgtcgtactaatgttactatcctaccgtgtgtttggttgggggttgagtgagttgggttggatccaacccagttttttgggacggagtcaacccatccagtgtttggttgcacttctgcttttggggacggagccaacccattttagtgtttggttgaagaaggattggggacagagcggctccatccagtgtttggatgaaggaattcagtgtttggtgggagccaacccggttggagcggctccgtccgctagattttgagggacgggtccaacccgcatctgagaggaatattccaccctggagccaacccaaccctcccatcctccaaccaaacagccacgagaatgggttcgctccgacccagctcgctccgctctccaaccaaacacacggctacagaagcggatatatttgttataaaccacccctggcctcgacatttttagaagtcctgttttttttggcaaactttgatcagcaactgatccaaaatatatatggttttggttgcacatactaccattggataactttgtaaacaaaagtagtaccattagatttgttttgcatatactctctgggtccaaaaaggttgcaactctcagttgccaaggaggaattggacagataggtaaaagatgcatgtgccccttacatcaccaactcggagtctctcttagtttatccctccacgctcatgtcgcacaggaacctgagcatctctctgtgctagcctagacccgtatagttgcattctttcttggacaaagcttcaagtgtagaatggcatacttttgtggacagagggagtagtattacaagggattaatcttgtggttcttttctttttgttattattatgtgctgcaattgaaagtttaattccaattctcagttaccattaaaccacaaattggatcttatattttgaaattgaatttcaatagaaatggttacaggaataacccctgagctaagtagacaatttattccaacgttgagcgaagtagctaattagtatgggtatatcttgtgatgtgatgtaaattatgagacaggtggcctatttgcagtgctttagtgggtgtattggttgtgtatttggtcaaaccagacgcgcccctgcggtcgacgaagctttgagttggcggtgctcatagccctggataggctcatggccatttggaggttggccggcagtaggagctccacatcggaggctagctgccagaccacctgtgaacaggtctatcttgtgctgtgtagtgagctcacagcaagaaaatgggtctggtagtccattgatccagagcgctgcagggctttgagttcgccgagagagttggagttgatgggtgacacaaagtgcaggttgacgaagttggcgaagcgcagacacgagatgagaccaaaatcccactacatttggcaatacaattcgtagaggtgccgtctagatggagagatgccatgtagacctctccaaggcgtggtggccgcggaagttgttgcacttgttcaaccatgtcaggggatcgaactcaccgttgaaacagggaaagttgatcttcggggaacatggatgagcgtaggtatcggggaaagttgatcttcagggaacatggatgaccgtaggtatcgtcgtggccatggcagttgtcatgactgaaatgatcgtcgcgcccttaggggccattgtggccataggggcctttggctggggaagtagtcgcgacagaagcggcaatcatgaggatcgccacagtcaaagtagatgtcgccgtggctgtagtgctggtgtcacggtcgtggaaggagtcatggctgtggtcatcgtcatcgccaccatcgtggctgccactggtgcccagaggtctcagtgaggcccccctcgatacgtgactggaacttcttagtccatgcaatgtgggcatgttgctcgatgtcccagtgctggtttttggtaccaaattgatatggcgcaggtggggaggtttgcgcaagggagagtagagtagtagctggaattgagaagatgaacacagttggtaacgaggctggtctagggtgtctgtggtggcgaggtaagagtcctctggcgccatcgtcgaaggaaactccatgcccctgcaggaggtttattctttcttcaataatcctgattatagatctaaggtgccctttaagtttaggtgcacttgcctaac

SEQ ID NO: 5024 - DNA, 3931 bp, Sorghum bicolor; identical to SEQ ID NO: 3562

SEQ ID NO: 5025 - DNA, 4233 bp, Sorghum bicolor
ctccagatacggtaggaggtcttccccctcctccctcgggccctccgcggttgccctgtccttcctcatccgcccgcccacacatctcctccctcgggccctccgttgccatggttgccgctccagatgttgcagtggccatggcgaaggtaatgtgtttgacaaaatgtgtcaatggggtaaacttaccagtgctaggataggatgattctatacaagtcaaagccagcaaccaaacaaaccaaaatttagctagacttcaacaatcactccaaccaaacaagtgagtattggcttgtgtcaacctagttaagtgtgacctggctcagaaagctagccaggcttggaatagaacacgaaccaaacagacccgtagtgtacaaaatgtacattggtggcttcattggaaagcacacattactgtgttgacatgcgtcaaacacctgaacacgtaatgggaaaaaataaagaagagaaggtattaagccaagcaattagttgcagtgaagggcacacgaagagaggacaactatataaatcaaacaaacaaaaggattttaaaaattatttcaaataaaaaacaaagacaataataaaaactacccggctatttttttccgtgcaaccttgctggttatgtataataaaaaaaagctagaatagccattttggtcactaaactattacttgaggatcattttcacccatgaactttaaattggtcgtattagttctcaaatctactcttagactcaattttatcccagaactatgaagataatcatttcaatcctcaaactttgcattttggactcaatttcatccataaactacattaaagtgtattttggactttaatcttttatttttaacttaactttgtctattgtcctacgtggaacactgcactgttgtatctggttagctccaacaccaccagggattggagatacaaaaataatattcataaacaaactctttaggaacgccgctaaggacaatagtacctaacgatgattgtccatctcaaatcgcaggtggtgatagacctatattattatagttgagccaaaatacattttgataagaatttctttttgatagacaaagttgaattaaaaataaaagtttaaagaataatgaaatgcactttatggatcaaactgagtttaaaatacaaagtttgaggaccgaaatgatcatcttcatagttctaggctaaaattgagcctaaaaattaagtttgagaactaaaatagccgttttaaaagtttaaggatgaaattaagctttgaataatagtttagggatcaaaatgactattatgcctaataagaactataaagtctcgagttcatccctagctgaaattggatctaaggcctccgagtcaaattagaggagccatagtagagtaccgtccattgaccattatgcactgcaattacaggtctgatgacagaatccaagtattacgaccttgaacataaaaaaaaaacaaggtgcacgttgatttgtagtgcatcccaacgctcaaacgagacaaagccaccaaccaaaacactgtaaaaaaatcgcgacttgttactaggagttcaacattttttttgtcagaattagtggtaacgaagacatttcacatgtaagcctttgcatagactcccatgtgaagtctagcagcattctcaaagtccatattataaactgccataggactccaaacgtaaaatgagagaactcctatactatagtccttgagattcgaggttgctgcattatattgtgcagattatattgctattgctgacttgtggttgacctgcttcgcaataatatactacgtacacaacattcatggccaatccggcagccaagaagcattttggtagggctcagtaaactccactagcactgtgtccgaactccgaagggaatagcagagcactggcatcggcagtactttgaagaggctcagtactgtccgtcgaaaagcggagaagatggcgaagctgctggtcgacgtcaacgtcaagcggcggagctgggcggtcagtgccgtgctcgccgccgtcgtgatgaccgtgcctctcttcgtcatcatccacagtgattttggagcgtcggggatttggattcagactgccgtggccggcttacgcaaaggtaacgaagtgctattaattccatgttcgcacgtagtagtcctctttgtttctgagatcacctgtttgcaggttcaaatgatctctccatgcagccgaggtcagcgcggcgccacgataagcttctcggcggcctactggtcgacggcttcgacgaagaatcctgccacagccggtaccaatccgccatgtaccgtcgaaaccccggcaggcaaccctcgacgtacctcatctccaagctccggcggcacgagtccctgcaaaggcggtgtggtccaggcaccgccgcctacagcaacgcccttgcgcagctgaaatccggcaagagcgtcgcgtctccgccggagtgcaggtacatagtctccgtgcccatcgaaggcctcggcaacaggatgctcgccgccgcgtcggcgttcctgtacgcgctgctcacggaccgtgtcgtcctcgtcgaccccagcaacgacatggacaacctgttctgcgagccgttcctcggagccacgtggctgctgccgccggacggcttcccgctggcaagctacgccaacttcagcatcgacaccgccgagacctacgggaacatgctgaagaacaaggtgatcggcgcgggcgcggacgccggcgcgcatgcgcaggtgccggcgttcgcgtacgtgtacctccacagcgacgccggcatccacgacaagaacttcttctgggacgaagaccagaggctgctccggcgcgtgcagtggctggtgatgaggacggacaactacatcgtgccggggctgtttctcaccaaggcgttccaggacgagctcgacctgatgttcccggagcgcgacgccgtgttccaccacctggcccggtacctgttccaccccaacaaccacgtctggggcctcgtcgcgcgctactacgacgcctacctcgccggcgccacgcagctcgtcggcatccaggtgcgcgtcttcggcgcccagccgaactcgccggagctcctggagcagatcacctcgtgcgcgcagaagcacaagctgctcccggaagtgctcgcgacgggaggtgagccgacgatgttgccagcggcgtcccgtgatgccaaggagtctaaatctaaagccgttctcgtcacgtccctcaagccctggtaccaggagaagatgaggagcatgtactgggagcacgcgacggccacaggggaggtggtgagcgtgcaccagccgagccacgaggagtaccagcggttcggcgtcaagtcgcacgacaccaaggcgtgggcggagatctacctgctgagcctgacggacgtgctggtgaccaccagccagtccacgttcgggtacgtcgcccaggggctcggtggcctgaggccgtgggtgatgtacaagccggcgaacggcacagtggtgccggacccgccgtgcggccgggacgtgtcaatggacccgtgttttttccagccgccgaagtacaatttctggcagaaccaatggctggatgccagtaagattgtgccacacgtccagcgctgccccgacttcccttgggggggactgaagcttgttggtgggaatgaatagcttcgaacacgtccaagcttgttttttcacttccacatttttgtttctgcatttgctaattactccctccatcccaaattgtaagtcattccaagaatcttggagagtcaaagcattttcacgtttgaccaaaattatagagtgaaatactaagatttgtaacgtaaagtgagtatactatgaaaatataattaaggaagaatctaataatatttagttggtatcataataattattattttatcatataaatttggtcaaactttgaaaagtttgactctccaagattcttggaatgacttacaatttggaatggagggagtacattacatgcgcatgaaaatcgatgttctcctcaggccgacgatgcgcaccttgttcaggagtggctgtgccctgcggcgttagaagggggtttggaggagcaggcctttcaaaaactaaaattgctgcctccgaaaatggttacaatagccggtggcatagacgcacccttgctc

SEQ ID NO: 5026 - DNA, 11760 bp, Sorghum bicolor
ctgaggaaattaggatcgactaggaacaaactacgccgtgccagttcttagcttcatatcatgaacctgaagctatccatttcaatttactggctttcactttgatatcaggttgtatcaccagatcaggcaacaaaaatatacaaggccataaaggacaagggccttcccgttgctttggttgagtacgaaggggaacaacatggtttccgcaaggtccagtgatcactctttaatccttagggaccgcatcttttttaagtgtcacatttttagtataagcaagaaattacttagtcaactacctaatatgaaaactcactatctgcttttgttctcaatcaagttaagcatcttaattagtataggacgaactcgaatttgcatagtgtaaactgcagatagctcatacctgacgggcattcctttgaacaggctgagaacatcaaatttaccttggagcaggagatggtgttcctggcaagattagtgggaaagttcaaggtggctgatgacataactccaatcaagattgaaaactttgattagtccttgtaaacgtttcaaacggcaccagtccttattttctgtttacctgctatcaactgctgaactgatcagcttagatgcaacttggtgcacctcttgggcagatttgcccagctgttctttcaattgaaatatttgtcttgttcgtttggttgataagccatgacagaaagtattgttcgctgattcgttgcgagagaaaaacactgttgaatgactagtagattcagctgataagttcaagtgaatgtcattacgagcaacaattgaagcaaagctttcctggtgttggtctgttactctgttttcaggctccacgatccgttacgtgcgaggagacaaatggtagtagcattgactggccatggtttagtttttcaaacgtccagtatcctgtttttttctctaaaaacatgtagttttacaactcctaaaaatatattggtaggaaaaaagaagcacaggggtgtttggttcccctctcctaaagtctagtctgtgtcacatcggatgtttgatattaatttgaagtattaaacatagattaattataaaattaattgtatagattgagactaatttgtgagatgaatctattaagcctaattagtttataatttgataatatagtgttagagtaaacatgtgttaatgatagattaattcagattaacagatttatctcgtaaattagtcatggtttttgtaattagttttataattaacttatgtttagtctgctaattattattcgaacatcacctcctaaacttgagtccactcttaaaacatagaagataatttaatgtcagaattctatactattctatcgcagccacttatttttttctggtacatttgtatcaggagttttttttctacttcttattctttgtcatactctttcacctttagattaaccgatacgtaccgggtctgcgcaaccgctactactatatgtaaagttacatgtgacatgagaagattttcaaagtatgtaaattttaggagcatggattagagaggtgatttttttcatcttgttaaaaaccaagaattgggaaccgaaatagagtattcttaaagatgctttagacatgactagctcatcaatcatgcctcaacacgatttataaccccctttgctctaaattataaaatattttgggtttttttaagatacgatgcttttactagtagtatataatgtatagcaaaagtctatttaatagagctaaagagaagtgaaaggtagaaatgtatttgaagaaaaatgtgtattgaaaaatgagctgataaaattccaatgatatgcagtccttttttttgagagagagagagactggatgagcctgcaagtcctgaactcctgaccggtccgccgctacctgtgagaagaggggaaaaaccccacaaaaaccacatataaaacagaaccccgcaccccgcaaatggcgacacggctcgcctccatcttctcgcccgtgcgcagccccacctccgccccggcccaccttctccaccgcactctccccagcttcagcaaccggcgagcgcatccctcgcagccccgcatgtcctcctcttcagccgcctcctccgcgccgcccgctgcagcggcggcggccggcggcgagaagcctgcggtggcgccgtacgggtcttggaggtcgcccatcactgcggacgtcgtctccggcgcggataggcgtctcggcggtatcgccctcgctggggatgggcgccttctctggatcgagggccgccccgaggagaaagggtaaatgaaatccgcttccgaggtttagtggcctaggcgttgacattggacgcgcacgcgataatttttagtgttggtacttgctaggttttagtaacatatttttattattaaacccaacttgcttaagtgaccttgcccaacctgcttaagtggccaggcgcccagcccttgcacgggaatagaaagcattgttactgattaaaccccatgaaacatgaaagagttccgcatttgtggcttgcggctttgaacagctgtatgttggattagacatgatctataataattgtgtaaagttcattatctagttttttggtgttctgcttagtggatggtaactggtgatctataattgtgtaatttgagaatcaggattatattacattttatttctgcactctgcatgtctgagcactcgcatgctaatcaacatgatgccgcaagaatgttgctgtataatggagcatattttcagaatattactaccggcaatcattgaatgtttgttgcttccatttgtgcccatatcggttatctgcttagtagtgcagtacattcaactcctctgtactccctgtcccaaaaatagttgacacttatgaatctggacgaacttttgttcagattcatagctaaagtcaggggtggatctagaaacaccatacaggggggctaattagtaaagggctgcttgggctggctgtaggaagggctatcttgggctgaacgttggggatttccgtggtctgccgaagacctgcttgtaataaatttgggctgcgccctgggctacagcccccccccccagcccgggtcctggatccgcccctcgctaaagtgtcaactattttgggacagagggaccggttctcaaatttgtagccatagaagcttggaaggaggggctagaggtagaagataatggaacaagcccctcctaacatatttttatagatctgcccctgatcatattgaactaaatctgtattcaggcgtatggttattgtaaaggaggaagataatcctgtggatgtcatacctcaggaatttgcagcacgcaccctggctcaagaatatggaggtggtgcatttgcagttgacaagagtgttgttgtgttctcaaattacaaggatcaacgtctatacaagcaaacaataggaagtaagtactaagtaggctgctatggtcttattgttgagacttggttaaaactaacattatataattgatgttcattaaaaacttagaaattgtaagtatgtgttatttacttgttgcaaatttatatcccaccacatactagtctatccgtttttagtacctggcacctttgaccaaataatgcttactatgtttttcatgttcttttgggcaatctgcgatgtatgtatgcttactatttgcattatttctaatcgtgcatgcttgtttaccttatcagttggtgctccacctgtgcctcttacacccgattatggtgctccgagtgtcagttatgctgatggtgtatttgatcctcacttcagccgttatgttactgtgatggaaggtacttgacctatgatttggttctaatatatatagttgcacaacaaacttctaacatgctcatatattttgatagatcgtcgaaaggatagcttgaatcccaccacaacaattgctgctgtagacttgagtggcagtgatgttcatggtaatatttccagagaatgttaccacattaccaaattagatctatgcttttttgatgtttatccatctttccttcacaacacttacatatttctgtattgaagaaccaaaggtgctgatcagtggcaatgatttctatgcatttcctcgcattgatcaaagtaaaaagcggatggcatggattgaatggagccatccaaacatgccctgggataaatcagagctctgggttggttactttgctgagaacgggtaattgtaattatcttgtgaatgaacatattagaacaagtcatttcttttcttatattgtgaataaaagtgaaggagaatataattggtggaatatttgatgtattgcattgggcctcatgggctgattatatagggtacataggactaacaccttatgtgggtacacaatatggtactattcctatttactctaacatccccccgcagtcacagcgggagcgctacagacggtaagactagagaagaagctgataagtaacatcccccatagtcataacagttgatgcgccgtgtatgctgtggctggagaagaagccaatgagtcctcatgcaaggcggtagccctttgtgccgatgtcgaggtagccgagcgtaagggcacaatagccgtggtcgaagaagtcgtgctaaagatggccgaggtcgacgtagttgtggttgggttgcttgtcgatggagctgcaggcacacaaggggcgccatggtaatgacggagacgcgtcaaggcagtcgtcgtgggagggggtgatgccgaaatcgacgcagtcaggactgtcgtagaagaaaggcgacgacgcaatcaaggcagacggggtaggaacgggagggtcgatgccgaagtcgatgcagtcaagccgcccgagcgccgaggcgcaactggatttgccagatccaacaacgtgtcggggacgaaagcatgcgttggtgttgccaataccaaacgtacaagggagagggccccaactgtgtggttgtgctggacgaagaagaagcaatgcaggagaagacgcatcgacgagtaggtctcaacgacgatgcgggtagtggcagctcgatgacgaagacccaatcagtaggacgaagaccttgcgggtagtggcagctcgatgacgaagacccaatcagcaggacgaagaccttgtgcagacggatggcgcagcaaggattgcacagcacagtcatcgatgcacatatgtcggcgatggagatgcaatggcgaagcgtacacacggacaacggtgttgtggcctgatgaggcgacacaacatcgcacgtagtattcggagcgcgcgaggtcgacgggcggtgggcgactcaatcccaatcagtgatcgggcaaaccaaaagatacaacaacagcagatcgggtgtacctagcaagatgacacgacggtggtggtgcgtcctgatcgggcggcgcaaggcacacggcgggtcacgaacatgcggggtcgaaggcgccaacgcagatcgacgaggtggagatgggcagatcctcccggcaacagcgacacgccagatttggctgcctccatggcagcgaagggtcgaggcgtgtggccgggcctggccgccaccacggcgacacgggacggggcgagatccatctgcctccatgcgatgaagatcaggtgttgatggcgacaaccggcggtgagcccggggatgaggcggtggcggcaacctggcgatgacgtaggggagatcccgatctactgtgcgacgacgacgatggtagccggatcaataggatcgggcccctaaagaggggcgctgcccccggcggagatcgacctctccccgggggcgtgcagtgcggaagcggcggcggctagggttagaatctaaacctaggcgaatgataccatgaaggagaatataattggtggaatatttgatatattgcattgggccacatgggctgattatatagggtacataggactaacaccttatgtgggtatacaatatggtactattcctatttactctaacaaaaagcactatcttgtctgcatcaaataaactgcgcgactaggtgatatatgtcaggatggtgttcatgcatatccacagcactatcttgatgaatatgcacaaggattttgataacagcttctaatgcccctaaagggccatttcatcatcatatattaaatatctaaaagataataaatcacattgtagttaatacaacacatttcgagagtagctgtagaaaaccaggtatttcctccaattttccctgtcagtttgattggacttgaaggttgcataggcaaacactgaattgctagtaggcagccaagtaccatagagattatgtcacgctgttattttgagcttacagcatggtactatgatacttttgtacagcactgaacatgtccatatagctgaattcccctttccaactttgctgatttagacccatgtatttttgtgtctgcagagacttgaccaaacgggtctgtattgccggtggcaatccactgctggttgaatctcctagtgaacctaaatggtctcccaaaggtatcctcttttctgctgtatttgtataattgtatgtacacctgattattgtaaaaatgcgtacacctgattattgtaaaaatgctaattatcggtatggttcagtgataataacatcagctaagtatctctttttattggaaagtacttcaaaattttatagtttcaagctttaacatactcgtattctttgttcacactgtgtattaaaaatgggatctcattatgttctattgaagttttatgttgcttgtttatgttagtcttgcatcattgggacattcaacatttccttgagcttcctttgttccaaataaaatgtatttgtgtggtccatgtccatgatataaatgaatactccctccatccaaattataagtggttttggtttttctaggtacacatagcttttgcgtcatgcctagagatcaggggcgaagccaggataaaatattgccggggtcgattcaaacacaatactaactcttagcttgtgataatataatactccttccatgccaaattataagacgttttggattttatagatacatatttttttctatgcacttagatacacacatagtaaaagcaatgtattaaaaaaaactaaaccatcttataatttgaaatgaagtgagtactatggatataactgatgatataatagcacagtactatggataatattactctcactaccatgttcgtttagttgtgttaaattgtaatcattgggtgcgacaaccacctctatggaactctaaaatttaaaaaacctcaactcaaaagaattcttggaatttaatcagcgacaaaagtgatttagaatttacctattaaaacaccctctaacttatataagttaaaaatcaataaattgatttaagcaattgtcaatatagtcaccctcatcttcagaaccgccatggttgcgctgcccttgccgacctctgaaattactgggggtgtgcttggaagttatgcttgctagtccgggccagccattttggctctcctggggcagcaaggaaaaccttgccgacataggaatcaaggcaagcaaggcacaccaaccaaacagctagcagtgtccaatttcttgctcggctaggtgaaacagtacctggaaagagtaccaagcaatatagtataattttcttagagatatatctttttttattttgatctctacatgaattatgctcttaccgattcgttattttagtctggcatccagttcattgaaacacactctcgaaaagcaaacatacaaaaggggacaaatagtttataatttgcatgtaatgttgtttggactttggagtccaggagagtaatcctctatcagtgcaaaggctgaagtccaagtgttttgggttccagctgtgctctgtgctgcacattcatgaaggcaaaaagaccgagcctactgggcatgccaattccctttggtccatgcagcttgcatatttgcgtcgcaagcctgctgcactgggctcctaggcacctaccgtctaggtctgccaggatcaaacattttttttaccggggtctaggctggccgaaatctgcatgctacgagagctggcacgaagtggctgaccccaactgcgtaacatagattcgcccctgctagatatccattatgtctactctagatacatagtaaaagttatgtatctagaaaagctagaacgacttacaatttgtaattgagggagtacataacttacttattcttagaagaaatggaagggcctttgttattaatcagttggatgatgcattgctatttgagtggtctttgcacttttgttatctgcaattcacactgcttagtgaataactaattatatcatatagaacatcggtaggcgattacgatatttttcttgtacagtattgtggctactaaccttatactatagttcatctaaaacattcaacttgcaggagaactgttttttgttactgacagagggagtggattttggaacatttataaatgggtaagcagttttctctcaactcttgagcttttctgacagtgttgtaactgtattttggccacacaatttaactgagattagtaataaattcagagttcataacccgtgccactcatgaatgagctaaacatgttgttattatgttccttttttctatctgaattcatcatctgaactgtatttgtcatgtaatctcagtatgctactttgtcatcaggttgaacaaaccaatgagattgttccagtgtattcactagacgctgaatttacaactccattgtgggtttttggcatcagctcatatgattttcttggaaacagcaaccacattgttttcagttataggtatctataatattgaagaaaaaaattctatgttgtttctgtttgtgaaacatcttcatgtaccatcacaataactgtgccttgcaggcagcaaggaaggtcacatcttggtgtgcttgattgtgattcagcttctgtttcattgcttgacacccctttctctgatttatctgatgtggtacgtgacaaaatctgaaaatcttcattgccactttgaaaacttgaggtgtatatgtttgttttcgtgacttatattggcttgttacttgcttgatctggcaggttgctgcagatgattacttctatgttggaggtgcttctgcaagtattccacggtcaattgctaaggtttatagacatcagattcacaattttgttcatatgtcgctgatgtgcaattttgtgtgttctttcaattgatgcatcgattgtttcctccaggtgacattaaatgagagcaaaacaaaagtagtcaatttctcaatagtctggtcctcctcaccagacctcgtacaatatagacctttcttcagcacaccagaacttgttgagttccctacatccaaacctggccagaaagcttatgcctatttctacccaccgtcaaatcccaattttcaaggtttggctgatgaaaaacctccgttgcttgtcaaaacacatggtgagttattcaaaccttttgatgccttggaatgcttaagtgttttgttagatttaactaaaataaatggtttttgcttggattctttcttttcagatgaaaatcacagaatgctttaacactctacattttcaggaggacctactgctgaaacacgtgctattctggacctcaatgtccagtattggacaagtagaggttgggcatatgtggatgtcaactatggaggaagcactggtttgtccttaactttgattgtttaggttaaacccttcatgtatagtgatactccaggacattcaataatgttgaacttcgtcaacttataaactgaaggttatggaagagagtatcgggagagactattggacaaatggggtattgtcgatgttgatgattgttgcagctgtgcgagattccttgtacatcctttgagcaataattctaatgttgaattggcatttaactttggaggtgataagaattcaccttaatgtttgattcttttcgtattaaggtggagagtgggaaagtagatgggcaacgcctttgtattactggtagatcagcaggtggatacactactttagcttcactagcattcagagacatgttcaaggctggagcttctctgtatggtgtaagttttagatttctagaatcctactattgtgtttgccataaatacgtggcagatatttgtatttattctattctgattgctatgtatgttttagatttgcttgattgctatggctatgtaattttggccttatttttatgtaaacgaccatagtaactaactgtattgtggtgttaccaatcaatgattaggttggggacttgactctgttgagagcagagacgcacaaatttgagtcccattatatggacaatcttgtaggtaagatacagtattatcatttctttttgaagatgttaactcagtttcctgctctgatttacatctacttattcatcccattcgttcccttaggaaatgaaagagcttactatgagagatcaccaatcaactttgtcaaccagtttacgtgtccagtcattttgtttcaagggttagaggataaggtatttgctgaccatgaactgtaatatttatcatagctgcattactaggtggtatatcgttgtttgtaagcataatttgtcaactgctttaatgttttccaggttgtgccaccagatcaggcacgcaaaatatacaatgccttgaaagagaaaggtttgcctgttgctttggtggaatatgaaggagagcagcatgggttccgcaaggttgttacctcactgtatacctatgttccagactttcagcgccttcgacactgtcaacctgcatggattttgtaacttctttctcgattttgaacaggccgagaacatcaagttcaccttggagcaaatgatggtgttctttgcgagactagttgggaaatttgaggtggcagacgatataactccaatcaagattgagaacttcgattgatctcttgaagagtggtgtccggttggaagttttgtattacccggttacatgttttgtacattggccattgtagattcttataggaatacgacttcatcttattttggagggttgatcgaaatctcattttgccctgtaacgatactgttatgccatctgggaaacagcatgcaacggcccagattgtgcagcagcctctagatctgcgtgaccgcgtgggcgagacggcatctggcagccgtgcttgtatggcggtcagggcagtgccacggcgtgatttggaggcgcggtcacataatgagcgaatgaaaattgcagatcgtcagttgaattggagatctttatgtaagatttagatcgaaatcacataatggtgaacataaaaatcttatgtaaatatagactattaactagaatcataaaatcaaactcaaattatgataataaagttgtaaaattagacgacagaatcgacattttgacaagggtggtgatgggtgtgatggtgactagcagtgagcgaatgaccgtgaccgctgcgcagcgacatccgcattggagggtcgtgagagacatcgtcattggagggatgtttcatagagcgtcatcgtgtgctgcgtcatttggtgatgg

SEQ ID NO: 5027 - DNA, 11129 bp, Sorghum bicolor
  misc_feature (277)..(376): n is a, c, g, or t
ttgataccaaaaataatattattttgctatataaatttggtcaaacttgaaaaactttgactctccaagattcttggaatgacttataatttgggacggagggagtactttttaaggccttgtttagatctaaaaatgttttggattttgacaatgtagcacttttatttttattaaaaaatattgtccaattattgagtaactaggcttaaaagatttgtctcgcgatttacatgtaaactatacaattagtttttattttcatctatatttaacnnnnnnnnnnnnnnnnnnnnnnnnnnnnnnnnnnnnnnnnnnnnnnnnnnnnnnnnnnnnnnnnnnnnnnnnnnnnnnnnnnnnnnnnnnnnnnnnnnnnactagatatgttccctatttgaaagtagtgttatcgtactaaacggtaaataaagtcggtcccttatactatagtattatgtactcgttatgtatttggataaacgaccgtgtgaacaataaaacggtcgataaacgaaattgacgtaccactacgtagcatttaaacaaatgtataataggctaaatggtgtataagagcatctccaaattctaaaatttactctctaaatcatcagttagagacacgaccaaaatggtggagttttcctagtgtttttagttagtaataaaacactaccactagtcaaaacactagggaatcctcactagaaggtatttactaggaaaagtttatactaaattttaaatgctaaaacactaagagaaccctacactactaggagaaattgaaaaatctggttgtgagagctattcgagtaaaagttatttttcatatatttatactcttcaataacttttttatatcctatgcatactcttaggagtcatcttcgttcttcatcttagttagcaataaatccggaatagagttatcaatattatccaattggagagattgtcagatgattttttttttcaccaaaatttctatttctttaaattaaaaaggatatatttttgataacaacataaaaagtctcttttaagttgctctgagagaactagttgagaacttaaggcacatctatgaattagtggggtactctttcctttcaaaaatattcatagaggtgcgaggccttgtttagttcacaaaattttttaagattttccgttacatcgaatctttggttgcatgtatggagtattaaatatagataaaaataaatctaattgcatagtttacctataatttatgagatgaatcttttgagcctagttactctgtgattgaacaatgtttgtcaaataaaaataaaagtgctacaatagccaaaaaccaaaatttttgaaaccatgcatattacgtccctgacatgttatgagcggttttgaaggcagttttgtcttttttatttttatttattttgactgaatatttgtaaaattatagtaaatcacataaaattcataaaatagtaaatctgattttgttggactccaaataagtagatctacatagtgaacatataatatagtacattttagtacaaaatttttattgtagctttagatctgtatttttctataattaattagaataattcatagctatagtttgtatggtacacttgtggtgaatttcttatgttggactaattattatatgtttaaactatggtaaaaatttcatactcattagatcatgtataacttagttattgatttattataatttaacaagcataaaccttaaaagagaccaaaaaccaaacgagaccaaagtcgggccacgaaaacgatcaccgatgcgctgcgctcatatgggcatgggcctgccaaatttggtttcggcactgtatgaatagcccacgaaacaaatcagtagtgttttccccaagcccactacactacagagccgctccatactgtacaccaactctgaccatcatcgcctcctccctccgccgtttcccgcccaaatccccaccgccgcccaaatgttctcgtcggaggaggacgagcccttcgcggcgcagacgcttgcggacttcctcttcgaatcctacgccgacgacattcaccgcatcctcctcgacgacgatccctccaagctccatttcccgcttgttattgagtgcgtcctcccgatcagttcctcccgttcccgttcccgttactgttcccgttccccttcaccaaaccctaaccccatctcctctcgcagattcgctgagcttatggagttcgaccccaagttcgccggcaagctctacttagatccctgtacgtacctgcccttcctcagagacgccgcacaatgggcccaggtcagctaaccatctgagcatacaaccacctcctgcatctccaattctccatgtcaattccccactcttttttctgaaaccttaatattgccttgcaggacaaggtgttgaagaaactggggaatttgaaaaccacagagacgaagaagtccgtgcatgtgcgtattgatgtcactggatcgccgctagaattccctggtgcgcacgtgtgcaactcttgtgcccgttcgaatgcctgtgtggtgatttggtgggccacttcatcatatccgaagtttggtggtgatgaaggtgttttgcacttttgcagaggtctccccaagtattggaaaggtgagggtgaagcatatgaggaaattgattgctctgaagggaactgtgatcagatcaggtggtgtgaagatgattgagtatgagaggtgctacatgtgcaggaagtgcaaacacaggtctgtgattcatatttcaggacttcttcaatatgtagacaaatatgggctggttgctggtgaagcatcacaataaattttgtatcagcgcggttctgttatttcagatggatatctacccattaagctggttaggtagaagcgtcctttaaaaatgtgagagaatttttctaaaactaaagaggagtttcatatttctagctgggctggcaagattatataatttctgttacatttttgtaacactaaacacccgtttggtagtgatccagattctccctaaaaatgaatgattctctgttcaaacagaatcacttgctcaattccttgatactgatccagatactccgctgaaatgaactagaatcagttggaaacaaccttttgggtgattctacctcccagtgttaaaacgagaaacatttcaagatgattcagggtgaaatgttactagttttaaaatgagaaacatttcaaggtgatgtagggtgaaatgttacagttttaaaatgaaaaacgtttcaaggtgattcaagtgattccgctcagaactagaaatgtttcacccatccaaacgggaagcctatttgggttacttgagtctgtaagctaaaagatccattagcaggagtctctgtcattcttacccttggttatattatattttttttcaacaaattggtggggatattcagagttgaaaactgtttgttgattgccttgaaagtttatataaacttccagatgattatattgtgacttgacaagttgacatatagcaagaaatgttgtgacctcatcatttcttctaagaagaattgttggacattgtaacataccttcatacactggataggcaatacctagattttctttaccttgaacagctttgaggtctatcctgagctggaggctaggaatcgtataaatcttcctccattgtgcccaaaggtatttgatttccttagtagattcttgtactgctgtttttttccttgttctacttcttttactgctgtttttttcttgttctacatatatctgtctacatgtagtgaacatttgcattgttctccgtgataggagtactatttttcttgcctgttacattttataattggttgtacttttgcttgaactgctatggaagctactacttataattttgctctgcatctaggcttcaagaggctgtacaagtgcttcttttcagttcgtagaaggtagcaccatttgccatgattaccaagaaatcaaaattcaagagaatgtacagcttcttggtattgggtctataccccgctccatgcctgtaattttgatggatgaccttgttgatagcattaaagctggaggtaagcagcctctttgtgatttatccataggatcatgtggaatgactattggtattattttgtcctccatgacctcagtccttatcctgcattatttttcccccatttttcaaatttctcagttgttttcagagctcaaaaaattcaggagctttgatatagtttggaacagcttgaacagttcactttatagcatttcaatgttggtttcttgatattttgaagatgaaaacgtcaaaataggaatatgttgtatgcactacatgagttgtgtataatggtcatccattattatgcttagccatgtttgttgtttctacagatgatgtcattattacgggtatattatctgccaaatggtctcctgatattaaggatgtgcggtccaaccttgatcctatgctgcttgctaattatgtgaggtaatttgattatttataattaggttgttcagcaagttttgattctattaactttgaatctcttgatcattagattagagttttagtcatactttgagctatgcgattagtcaatttcaattctttattctttgaagtatttcatagcgtggtatgcttgataagaatctggagggtcctgttcatgcatccagatcaatcctgtgataacaaatcagtaataagatttatcatgttaattctagttgaaaaattgttcatgctttcttatgcctggcttgtatgcagccaacaaaataggggcctttgtctacagtctgtgacctgactcattgactagttttgtttagtcactgcattgtagtttccttgtcaccatctactaaagtactcagatcagatgtcatcagaggtagtcatatgtttggactgtagaagtttgcagctatttttatttgtccaatggatggtttcttgtttctggttcaagtttgaacaatgtcagttcctttcatttgttgttcttatgtttacgaatgactgtgcatttaggagaacaaatgagctgaagtctgatatagacattcctgcggaaactggagacaagtttgggtgtttctgggaagaccatgctcccctagaaggtgcttaagttctggttcttattctgtgcctgggtgtttcttagactgatctaaacctaactttctaccctttaagcacaaataatgcatttcacttgccaattagtataaataagtttctgggaagaccatcttcctgcagtgcactgggcagcatcccggcaaggattgggtggctgcacaacatgaattagctccggctgctatgttttgtgtttgatggagcactgtcacaagatgtgctggtgagaggcatggcatcacattgtcctgtactacaatatactgtctacgtcagtgtgaaataggtgagtttgtgtggaccttagacgatccacttagactcatgtcggcacgtgatcagctgcactcctgcaatgcaatgtgacattgcagcccagtgctgaggaagtgaggatgatgctgacgacacaggatatcatcgtaggggaaaaaataatacacttatgtgctgcagtggtcagacagatgtgctgaatgctgatattgcaaccttccctggtggctggtgcatttggtgtgatctggagttcagacaaagcataggatgttctagtccaactccactgaaaaacagttatggaccacaatccgcacagcctttatttgccttctcggaggtggttccttagatccttagttaataaatactgtactgaccagtgaccactaaggtgggatgggcaatggaggatgaagaggaaggggctataactataagagagggatggaccatgacttcggttgggtgatcataaaccttgagtgaggaaatgactattttctttgcttaactgtggaagtgggcctccccatattttatagtgggttcactcccaacaaaaatgtctaaattaaatcttatgccttagcttttgtcctaagtcaacttcaattcttatctctgatcaagctgtttgaaaatagcttatctcccatccaagcgaaagaaccaaattgaatgctactgcagctattacattaatgtttacattacccaatactgtactaatgtaaactgcttattcaatgtctcttatacacaggaagaaatttaatcttgaaaggcatctgtcctcaaatttatgggctattcacggtgaagcttgcaggtatgtaactaaactgtattgttgtcctactattaactagtcaagtagttgtacaactgtgcagctaaccttgatatacactcttaggaattaaattgcacacaaatttaaagcagtgtgactaatataagtcattcacctagctaaccttttcttttcacttcctataggagcaagagagtattttctttactttacttatttcacttgtatgtggttctctatgacctattgaagtaatttatcatcaagctgtgcctggcagactataattaaacaacattaactgcactacacaatggctatcaaacagaaaactgaaaagcttataccaaaaacctgacataattcaattttcagttgctcattcatcctgtcttgttctttatgtgtgccatgcgtccaccctcatgtgattcataaatcccaagtcccaaggcttaaaataacacagctgattccatggtgttgctcgattttcaatatccataatcacctggttaaatttgtatcaaatggctgggaacccccaacagaattatattctatattaaatgcttggtagcatctgataatgactccatgctccaaaatacttcgttaatttatattataaacctaaattatagcgagttcttgttttgattctagatttttttttcctgtaaaaatgcaggctttttgaagttgtcatatgccaaataaacatattataacatcacaatgtttaatgattccagttgctcttacattaattggtggagtgcagcatgttgatgcttctggaacaaaggttcgtggagaatcccatatgcttcttgttggtgatccaggtactgtattcatgacatgcagcacgagtagcaatttctccatgggggctgcaaggctggatttcttttgagagtaggtaggagttgtgcctgtaatgcaataaaaaaacagaatagaggttgtaactatgcgccgagagactattgcatggacatggacatgggtgtcggaatccaacttggactccagtcacttcagccatagattttggagttgactggaatcacttggaactcgaccagggtgtcaataaactgactcagaaacaatttttaagacttggtgtcctggtaacaatgttaaggagtcatcagaagaattttttttaactgccagttaaaataactaagcgctgtcatgctgagttctgtgttggatggatttgatcagagagggtagtagtaagaagtttatggacatgatcctcgaccttgtcagtgcagctggggagctgtggttggctactgcgccagcgagactggggtagcgaagcacaatgagataatagatcggtccattgcttaaatatgatgggtatgccagtaatagtaggcaaaaagcttgaccctactatttatgtaaaacgaaggaaaacattatttagaaaaggaaagacaaaattgcaactatattttgttccattgaatttcaggtactggtaaatcccagtttttgaagtttgctgctaaattgagcaaccgctctgtgatcacaactggtcttggaagcaccagtgctggtttaactgtcacagctgtcaaggatggaggtactacgtctgacatatcattatgctgttttttgtttcatctgcatctaacaacgattttgttttcttttttgtggtgatggcggtggtgggggtgtattgtcaggggagtggatgcttgaggctggtgctcttgttttggctgatggtggtttatgctgcatagatgaatttgacaggttatcaatcgccagttttctatttactattgtttactagtgcaattaggccctgtttgggtagtgtccccaacacgacagacaagtcacggcaaagggaaaagtgcggcagcctaacctgtggcaagatacggaaactaaacaaccacctcaacttctctgacgaattttggtgagatgtagaagtgatcgaaatacgtccttatagtgctgtatcattgttgaaattcaagacgttccaattcctaaactatattaaaactcatctgggcatacaaaatagtactaacaccatcctctgcactctgcagttctgacgtccgataagagtggtacatagatgtatacacatgcctagtataagatgtccaaacagatataatatgcatgcataatttttacctgatgcacagctcgtcttattgtggtgttgatacttcttataagtcatggtgccaaatttaatgcaaatatgattattatatgacctacttatcatggagatctatgacacctaaatctgacattcttcacaatagcatgcgagagcatgacagaacaacaatacatgaagccatggagcaacagacaataagtgttgcgaaggtactactgcttttaaaaattgccagtttctgtactgctgacagttactagtgtggactttaactcagcattattacttatttgtcttgcaggctggattagttacaacactcagtacaaggactactgtcttcggtgccacgaatccgaaagggcaatatgaccctgatgaaagtagtgcttttacacatcaagcaattatatagcttagttagttcagtaaaatgttgtcagaagtcagcactatgttacaggcatatttacttctgggttccactctcacccataacgcgatggtgttattgagctattggctagttaatttcttaagattcactcggaggacttccataacatgtactttggggcaaaccattttcaatttgcttaacaatattaatttagcaaggcataaaaaaaaacaaatgcatgcttctaagattttatggttgtcccttgctaaagttcttagatttttttttctttggatacaatttttttatttttgaaaaatcctacggttttgtaaaatacttctattttgagaaagtaaaaggtttgcagaatcattataaaaaaccttaacattgctaaaaccatttttttggagtttctgcgctcaggatctcctcatcgcctccccccccccctcctcctctctctctctctctctatttgtcacatggttttgcacttctgcacgtctttggtatctgaaagtacagtttcttggtacccttttttcttcagaacatccaaaaatggccttttcccactctgaatatatctttgttttttctcctttcaggtttgtctgtgaatacaacactttcagcaccactgttgagtagatttgatatagttcttgttcttctggatacacaaaatactgcttgggatgaaatagtttcatctcatatattggaggtatgttttgtttctatttaagttggactcactacagactgcatcttgaatagacttaatccatatgcatgaaaataatctataaattgtcagtcatcgaacagaaaatctattaagaaatgttttttcaatgtgcagaatttagatgaaaagaaagataagacaaatgcttctgatgtagagtggacactccccaagttgagaaggtggaggcctttgatgtgttgcaatacaaataaatttattttaacatcctcacctaatttatcagcttctgaaactgctgttttatcagatcgctaatgagcagcagaatgtttaaagtgcatttagctatatctgctgttctgtcctgaaaattttcggtctttcattgcgaatactaataatactataatacttgagtatttcaaatttaaggtacatcaattatgtaaggagacagtttaaaccagtgctgacaaaggaggcagaaagagttatctcgagctattatcagctacagagaaaatcaggaacacataatgcaggttagccttagacaagcacatattctttagccttggcattttgcagcctctaaaaaataagcttctaaattgcagcaaggacaacggtgcgcatgcttgaaagtttgataaggctagcacaaggtctgttctgatctcctatggttcttttcttcctttcacaattgctattcttgatcctttcattcctttgttcttaccgtttattttttctgctgcagcacatgcaagactaatgttcagaaatgaggttagacaacttgatgccattgctgccatattgtgcatggaatcctccatgacaacatctccaatagtggacattgttggaaatgctctgcactcaaattttacagatgaccctgatgaagaatgtatcctaacatgtgattttgtagcctgcttattcaagaatatcaaggacttgagtcatttcttcagtaaaaactaaaaactgaattcgctttgatgtttttccttttgttttgctgtgtcaatgaaagtacttgtctatttctttggcatgcctgcagtagcaatgataacaggatgtacattagatgtcttctctcaggaaatgttaattttatgtggtaaaacacatttcttgttgctaactgcctcggtaccatttgaaatgcatcatcaggaaatgcattgtacagctggattctgtaaaccagcaagcagctttcctgtgtgtttgtttttcttgacatgccatagataaaatacaggagaagcagattctcaagaaacttggactaactcaaggttccccataattcaatacaaacatcagttgctgcatcctttagattggttaacctatggacttacgtgctattctgcacaatgaatcagtgatacgtgaaggtgaacttgatacttatgtggctgtttggctatccttacaaaattgctggcataattagatcgacaatcagcatt

SEQ ID NO: 5028 - DNA, 3445 bp, Sorghum bicolor
tttttgtgaccaagaggcaagagccatccagaggatctatgctcctttcttttaacattaaactgccgttgcgttgcccgttttgtatattgattgatatagtagaagaaaagaaggttctgtgcgaggtttgacaagaaatgcataagctaaaagctaaatatagattgtcgacgatgttatttctggcaggctgatgtatcatctctggaaaatccacaatgcaccaggatatattttcgtatgatatatacatcaaaattttagcaagcaaaagttcggcaaaaacaaattcgtagatttagcaaaccaatgtgagaggttggcaagttttagtaagtagtaacaaattaaataacagccaaaatcatggcttgcttcaccgttggtttgacatttttttaatcgaactaaacagacatgaacttctaaagtttgaaggattttcgaatggcatatggtaatttcgaaacctcctatggtctagggctcttcttatgagatgcgtacttacagagtaggaataagggcttgtttagttcgcaaaaattttggttttcggctactatagtatttttgtttttatttgacaaatattgttcaatcactgagtaattaggctcaaaagattcatctcataaattacagataaactgtacaattaatttttactttcatctatatttaatgttccatgcatatgaccaaagattcgatgtgatgagaaatcttgaaaatttttgcgaactaaacaaggcctaagcgggaagtaacctgactgccatgtactggttcagtggtgtcagatcttagtacgttgctgaactaatttgtgcaaatgttgggactgcattgtttctgttctaattgctcgcggtcgaggttggccatgtcaatataaggtgggtgaatggagccctgtagtcagtgggtagccgcgaggggagggggctagcagggcccctctatggtctacaacttttgtatatacttctactttagtcattagtatataagtagttatttttaaaggaaataagttcttcaaggtcatattttcatttctttcctttgtcttgccccctaatttgtttctctggctctgcctcttaccctagttgatttctaaggtctggttctagtggaaaaagggctgctcttatcctagtaatggcaatgaattgttctcatttttctccctccaagcaagagaagttctttttaaaaaagcaagagaagttaaactagggttgtcgacagtagctgtaaaggtaaccaggtcgccaatacttgctgtttttcactgagaatggaccttgctgcgtaaaggttcaagtgatcctgctgcatctttgcgctggtttgatttgatggtctgccaaagtgccaattgagtgaaacgttttcttctgaaaaaaaatgagtatataaaatgttaaaagccaaaaaaaatcgccgttgccggggatcgaacccgggtcacccgcgtgacaggcgggaatactcaccactatactacaacgacttagttgggtgacgacattaactagtcattctgacttgtgcgtgtttcagctgccaccaccgtcggtaaagtgcgattgccctttggtgcttcctatgtcatgccaatcgcagaatcttcgttggctgttggctcaagtcaagcactgtgtgcatttaatttaaacaaaataaaatcaaaacaccgacgaggtgtgaccgtgcggagatgcgtattgtacaatacaaaaacaagaggcgtcatgggttccatgacaaccaccgtcctcatcactcacggtgctccacgtccatcctgactcctgattagcaatagcaataataaagattgagcggagcatcctgaagaagaaccgcgcgcgaccggcgcagcgccgtggatttctttcgctcacaaaaagaactgccgaactgggaggaaaaagggggcattctttcggtgcgtgcgaggcaaaaatagcgctggcgaaagcagcatgggccagtctctgatgaagttcttcttcgacagctcctgccagaaagaagtgaaggtaacgagtggcatgccattgctacgaacaattgagctctccctctatggctctggattcttttcttcttctttttttcagtctttcagtttgctcttgccctgctattgtaggttgtgatgcttgggctggacgccgccggcaaaacgacgatcctgcaccggctacacgtcggcgaagttctgtcgacggtgccgacaatcggtatacaatctcgactctcaagctacattgaatcattgatcctagtacgtatcatatatggtatgcattgccctctgcaggtttcaacgtggagaaagttgagtacaagaatgtggccttcacggtgtgggacgttggagggcaggacaagctgcggccgttatggaggcaatacttgagcaactcggacgccttggtattttcagtttccacatctcctgtggtctacaggactactagaccattctcgtcgatgcgtcaagctgaatgctcttgtatgtgtcgcagatatacgttgttgattcgacggacagggaccggattggggttgccagggaggagttccaggccatcgtcaaggacccgctcatgctcagcagcgttcttctagtgctcgccaacaagcaggatatggtaagttggtaaccactgaacgcctcttgtccaaagcaaaccgaggcagagagaacgcctctcatctcagctccttttttcttggcgcagaaaggcgcgatgagcccttccgaagtggggcagcgcctgggcctgtacgacctcaagaacagggcgtcgcgtgccgtgggggcctgcgcgctcaccggcgagggtctgcacgaggggctcggttggctggcggcgaccctcaaggacgcgcacacatggggaacctccgtccgcttctagtgccgggtttttttttttttcttcaggcgtatcaccatttcctgcgtataggcaggccatttggtcgaattgtgaatctgtcgtttggctcgaaaatttgtgcttttattagaaaggaatgggaaaaaaaactgcaagagtgcctcaaatgctcagtgacgcaaggttgaggtctctctacagaacactgaaatcagatgtcccggccacaacaacacgatgaaaatatgtaaatgtgatatggaagtgaaggaagaatgcatcagcttatacaatcatattgcagggttaaaatctattcaagtaacaaaatggcagcatcacaacagtaccttccgtgtaactaaaacatagtcgttttgcataactgtaagtctgtaactgaaacaatacagtacaaagcttaagcatcgtcaatacggaaacaacatgtctgagaacatcccgaaagctatgtgtgaaataattgaaggcggggataaggtccagccttctccaga

SEQ ID NO: 5029 - DNA, 3457 bp, Sorghum bicolor
aaaagaaaaaatacattgtgaaaaaaataactgggagagaagctatgtttgagtgagtacgcgaagcctgttcgctcccacttcaatccatcattcggcctctgcttggatgacttgtaggagttcaaatgttgttgtcaagcccctcagaagcattgtgtattgccttccttccaaatctcccatgagaccaacgcgaatagcgagtccatgcctgcatgcttgttgctggtgaacaagccatgaagttgtctccactagcatagagtggatgctgctggcactggacaattgctttggattgtcgagaggatcaggaaccaaacctcctagtgttgtgatcgattgtttcctgagcctgatcacaaagaaaacattcgctacgagcttcaagaccatgttatctcgtgcgatcaccagtctagtgttgtcgtctaagtgatagccatagaaaatcttgatcttgagcgatgcccaggttttccatttgagattatgcccttggaacggtcttgctccggcgtgaagcatacggtaagccgacttggccatgtaggtaccatcagggggtccatctccgtactatatcttatctagttgatcaactagctggaagtccctcagtgtgttccaaagcaacagatacacaccgatcgcatcagctgacttaccacccaatatgcgtcttgtccaagctttgttggttagtcaaccacggacaggctgcgtcacgctcgctttgtcaccagctatgcaaggcatggagattgtcgattgccgattcaccatcgatccacggtcttcccaaaagagcgcttggcggccaccaccaacaatggtgaaggttgaggccctgaagaaggctacctccggcgctgtagaaataggtagctggctccatgctcaatcgcggtcagttttttgaagccacaaccattttgtctgttgcgtgaggccagtaagtttcaggtcgctgatgcccagtcctccaaggtcagtaggtctacaaacagtcggccaggagaccatacgcttccccctgaacggaatatgtcagagccaacctagaaaaacttcctgcaaatgctgccaatctctcctttcggacccatggtggtaaactttttgcgaccattgcataaattggaacagatcgaagaacgggtttaatccatactaggcgaccgctccgtgccattagcgccccatggcatggtagcaacttccgagcgacagattcaacgactgacagtagtgtgctttggggatcttcttgttacttaggaacggctctaaccagtgacaatttatattatctattaattaatgacacagaactcataaatagaaatatcactttggaacacattagctaactctaaagggaaaccgtacgttagctctctatttcctaacaacaaaaaccacacgtcggcaacttcagtcgatcaatgatcatttgaacgctggcaagaataagcagaaaactcgactccaccagacattttctcttggtccagaaccctaaacagatgcagtcccgcggcgttcaaacttgcagccatgcatgaaatagttgcgggcacgttccattccaccgtaagatcactacccccaactggcaacagcctaacaccttcgtcttcctcacttagatcagatctgcatcgatcagttccgaaccacgttacgtgcatctacgaacgagcggcgcctgaaatccaaaaccgcggagctgatgcacgcgcgcgtcatgcgcctcttaaactccacggcgcgccgaggccgcccacacacgcgcacggcacaccttcctcacgtcgtcgcctttacacccacaggctccctccagccagctatataaacccactgccaccacgagctagatacgtagcccaagacccaagtgcgcgagctcagaaaacctcacaacaacaaactctccatctgtcagctctcgctcggaatccatgggctggcgcaagaagccatcgtcgtccatgacgacgacgcagctgatccgcctcgtggtcctcaccgtcgctctgctgggcgccgcggcgccgcggcgcgcggcggcgttgaacccgcgcatgctgttcctggtgaagcccgacccgatcgtgcttcgggaccacggcggcgcgctgctcacggggaacaacctcaccgtcaacctgctcttctacgggcgcttcaccccagcgcagcgcgggatcgtcgccgacttcgtccgctccctctcggactcggccgcgcctcgcctgccgccgtccgtggcgtcgtggtggcgcaccacctcgctgtaccgcggtggcggtgcgcgggtgcggctcggcaggcagatcctcgtcgacgagcgcctgtcgtcgtcgtcgctgggccgcccgctctcgctgggcaacgtcacggcgctggcgcgggccgcggggcaccaccggggcgccgtcaccgcggtgctcacggccgccgacgtccccgtggcgtccttctgcgtgtcgcggtgcggcggccacggccacgaccgcggcggcgcgcacggccgggcgcggtacacgtacctgtgggcggggaacccggcgcagcagtgccccggccagtgcgcgtggccgttccacgggccgacatacggtccccagaccccgccgctggtgccgcccaacggcgacgtcggcgtcgacggcatggtcatcagcctcgccgccctcctcgccggcacggtcaccaacccgtacggggatgggtactaccagggcgacgccgccggcgccgggctggaggctgccacggcgtgcgccgggatcttcgggagcggggcctaccccggctaccctgggaagctgctcactgacccggccaccggcgtgagctacaacgccgtcgggcttggcgggaggaagtacctgctcccggcattgtgggacccgacgacctcgcagtgcaagacacttgtctagacatggcagactggcaggagtgacgcccgcggcgcgtggagaatgtcaaatgcaaggaactgacgcatgaagggagaaaaaataaatgcctcatttgtttccttccctgttcacttgttgcctgtacttgtagtttgtcctacgaggagagattgcatgatgcatttgatttgcatgtgttatttaaaatgtgtggtcttttttttaaaaaaaaagtaatttttatttgtggtgtgtcaaactaaaccccatcttcactttcttctagaagttgatccatttaatgacagaaagagtataagagattgtgtggtgctctggaagcacctccaatggctaactctaaggtaatatcagatgccacatggagaatagatagactaacgatcttcgagtttgagaagaactaagctctttatgcatctcaatgcatacaaaagaggtataagacacgagagagaatatatgaggcatataggatgaaatctcatctaataaga

SEQ ID NO: 5030 - DNA, 3346 bp, Sorghum bicolor
tgcccttttattaacaaaggcggtcataaaattcatccgcctcctaaaatcctgacggattaatagaggcggccattttgatttatggaggcgtttacttttgcccgcctcctaaaatcgatttacggaggcgggcattttaagacaaacgcctccaaaaatggtctatttttggagacggtcatgttaaaatgatcgcctccacaaattcattttcggaggcaggcacactataatgctcgcctccaaaaaaggccacggcccaacaagcccaggcgaggcccagtagctatcatcatatatatacatgaagttagggtttagagcaaccgagtgcctcagtcgagcgcctctccctctcttctgttctctctccctccctcaatcgagtgcccctatctctcccactcctgtgcgctcctcccctcctccttccactccaacgctcctcccctcctcctccgcgagccatggctagcacctcctctagctcctctgttgcctgctgcactgtgctccttgcgtcatcactcatgtgcgttgcatgcctctttggcgccagggaggcttcggcggcgcctaccatggcccggatccacttgcatcctcgtcttcaccggcgccagtggtggatctagcctcctcctccacaccgacggtggatctggccccctcctcaccgtcagcggatctagccccctcctcaccgacagttgatcaagttccctcctcctcgctgatggcagatctggcgctcctccacctcctcactggtggtggatcgggccatagtggcagcggatccagtcatggagggggtagattgggtcgcggtggcggcggatcgagacgtagctagagcagatcaggtcacggcggcctagactgtgtggggaggttatgctcctacagcggtggctcaggtccaggcctgataggtctggactttgcgctttttcttttttttgttttcctatttgatttatggaggtgggaaaaataaccgcctccattaaatctccattaatggaggccttcgattggaggcggttgcaatacccgcctccattaatctttgtgtagtagtgtagataaaaactattttgctatcatggacccaatttacaaaattcatgagtttacggattcgaatactatatttctagactcatgcctatgaacccaccaggtctagctttttaccccttaagaaacccatgggtacagaaattgatctagacccggcccacgccttaatagggtaaaaaaaactattgggttttggtagccgttgccatctttagtcacatattagcacactccaagtgttaaaaataatgttgtcccggtaaaaactgagatacccaaaaacatttactatcgatgtttcctccaaaaatcacacgtatattaccaatcaataagtagaaaagcatgaacaacgctcaccataaagttgacgagagccaggcagccagttattccaggtccgtatagcctatatgcatggttcttcaagcttgacgggcacgaaacagttcaccaactcgcgttcgtctgtgcaaaacagataaccccagatctcatgagctgacataaaggtgaatgtcgcattgcttctggagtaggaatgagctaacaagtgtttagttgaagcctccatcatattaggacaactagcaatgacatatgccaatcccctatagtagtgctcagcggaagtccacggctataaagagaccaaaaactcttcacgaaccaagcgaccagtcccatatggagcaagtagagtaggtgtcaaccgaaatgcacctgggagttctcacagaacatagacatcctgtacggccacctgccctggcatcaagagagctgacctaatccatttccactgcacttcgcgcagttcagaatgcatataaatgtgggaagatggactgtgtgctctgatcaatcaggttccatatcaaggtgagacctgtatagagagagcgttaacaatgaaaggatccagcgagcatggcgagacctcgaaggcggcgcccctgggcaggggtggtgtcagtaaaggagtgtccgtgcttgatcttatacttcgcttcattgccatcatcggcacccttgctagtgccattgcaatgggcaccaccaacgagacgctgcctttcttcacacagttcatccgcttcaaggcgcagtacagtgatctccctactctcacgtaagctaacctcagtcagcaactcaatttggtagaaacaaacactttcagttaacgaccgaacatatatatgagcatctgatgctccaactgtttcaatttgttcatttgttgatcgactgcaggttctttgtcgtggcaaattctattgtctgcgcctacctcatcctttcgctcccactatctatagtgcacatcatcaggagcagggctaaatacagcaggctgctcttgatctttcttgacgcggtaagactaattaactcttttttacaattcaaagaaaataatgctgcatgaaagcatgtgtggttattcaattaactctttttgcatgaaagtgtgttgaaaagtgccagcaagtatatcggttaattggttatctgttttcttgttgatacttttgaaggcaatgctagcattggtgactgcgggagcatctgcagcagcggctattgtgtacttagcacacaaaggcaatgtcagggcaaactggcttgccatctgccagcagttcgactcattctgcgagcgtatctctggatccctcattggttcgttcggagccatggttatgctgatactgctgatattactctccgccattgccctagccaggcgctaggccaaatagtgggatcatttgtttccagcagtgtgaagtgtggtatcatggtgtggttattcgactactctgctatctttatgtaatcatatgtgtgcctattattacctcttgctatgatcctctcctatatatcccaattgttgacttgattctgagcttctccttttcttctgatggtgtgtgcaacatcatgtatatagaagccacagaaaatgagtatggatgaactattatgtatggatcatggatcaccatagtttctgaaggagttgttgggtattgtgttcacttaggacaaaaacatgaaagattattgaaaggatcaagatgcccaagaggggaggtgaattgggcttctctaaaaatttaagcaacctataagctccaattcaacccctttgtgcctagtgtgacctagagagctaccggataaaaagttttgcaacctagttccaatcctattctagcatggcaattctaagaatgtaaaagcacaa

SEQ ID NO: 5031 - DNA, 3942 bp, Sorghum bicolor
cccttagagttggagcaagcaaccgttctggaaattgattttagctaactttgagtattaaattccatggagctaccagtgaaacccaaaacattaaggcaatgcaaaaatatggttactctatttctactacaaaatatggccatttatccttcctttcatacacgttttgctggctttacgccacaacaggctgcgtctgcttgtttcttaactgcaatgaataatgtttactactttccttttgaagcagcagccagcaatgcacccatctcaccatctgaacaatcctctcgttaggaatgaagtcaaatctgtttgaaacatcgtactagaaattccattcagatttgcagccatctcgagctatcccgtgattctacctgggccctattagagccctatagataacagctatatgctaatagttatctattttagatccaaacaggtacagctaataaaacatatagctaattgttacctaaacctttgatataataactatctcactagttgaccaaatcagataataacaactaatacttatcttagtagcatttttcattagctgttcatccaaacatcctccagctaatagctaactaataaaagtagctaatatgagatatgagctattagggcactcacaatgcagactctatcaaaaagtctaaagttatttattacctcgaacaatgtggatttagagtctaacactagtataaagaagctctaagctggcggtggaatttaatttttacaggcggttttaattaaagaacgcctataaaaataaattggcgggctcaacttaaaaaccgtatgtgaaaatcaattttcacagacgattttcctaacaaaaccgtctgtagaaatcatgtatttctacagacggttctcctaagaaaccgcctgtaaaaataatatttctacaggcggttttttaagaaatccgcctctagaaataatttgaaattgaattttttgagtttttcaaatgacctcgtttgaaaaatccatcaaactaaaagttgtagatctcgaaaagttatgaaactttgtagttgataattttttcatttgaaatcatcttgtcgtcaaaaactacgtttgaatttctcaaatttgaaattcaaattttgtaaatgacctcagatggagaaactaccaatataaaagttatagatcttgaaaagttataaaactttatagttgataacttttccattggaatccgtttagggcctcaaataatcaatatatgctcactaaactctaatataaataaaagtgagtgataggtggagtggtagaggaggttacttgcaagggcaaagtctcaggtttgaatcccactagccgcgaaagctcgactgggctgtaattaaatctttttttttctatttttaaaagtcaattttgtattttctataaaaagatttctactctcagttacccgcctgtggaaaagtttatttccacaggccaacaacgtaggcggttcgtcaatccgcctgtagaaaggggttgcgaaccgcctgtatagtacctttgtactagtgtaaataagacattaagtcttattttttctatctctttctgcaataaataagctgccacataagcaaaatactatagataatatgtaattaattgtcttgaactctatgataaaatcttgcattatgagtgtctttagtcagctaactattagtagataatgaatccaaacattacagccatcccgagcttcacatatacagtagtatagattcgcgaatccttaccagctactgactgtttacaatctctcaatctcaaagacaaacacttgattatttaacttggaacgagatactcaggtgttccacatacgtacgtaacgaaggccgtaaattgatccgacgaccgatgtcaacgtacgcactgaatcctatatgtacatcgaactggccggtggtgagctaggcagctagcagctatctaggttgctcgagatgaggggagcgcacgagccactgcatccccacaagcagatgaagacatcgtcttcttccagagagggcaaccatgggtatttcgtgcccagacccgtctgcgcttggcttgtctgcggcttcgtcgccatggctctcctccacgtcctctgctgcactccccccggcacccaagaagccgtcttgtctccactgctccagtacgtcgacgacacctacaacttcgtctcatctgggtacgtaaaagctgcattgcattcaccacttagatcttcaatgcatgcatggtttatttgttgctaatctttggacaatgcaggccggagagctgcaactacacggaggggagatgggtgtatgcgccgggccacggccggcggtacaacggcacggagtgcgacgtgaaggacagccagaactgcatccgcaacgggcggccggacacggggtacctggactggcggtggcagccggcggcggcggggtgccggctgccggcgttcgacgccgcggcgttcctgtcgtccgtgcgcggcaagcacgtggccttcgtgggcgactccatggcgcggaaccaggcgcagtccctggtctgcctcctggtgggcggcgccggcgtcccgcaccgcgtcgtgtaccgggacccggactacccgcgcaagttcaacctgtggcggtacgcgttcccggcgcatgacgtgacggtgtccttctactgggcgcccttcatcgccagggccacgggcaaggcgctgaacgacagcctgccgcagaacatgaaccacgtgcacctcgacgcgctcgacgaccggtgggtcgccgacgccgacggcatggacgtcgtggtgctctccatcgcgcactggccgctgaacggcgccatctactacaacggcagcgcgcggatcgggcaccacgcgcaccgggagctggacccgtcggaggacatcggctacgcctggccgatgaaggtggcgtaccggatggcgttggaccggctgatgacgacgagctccggcggcggccgggcgccacggaccgtggtgatcgccaccttctcgccgggccacttcgaaggcaacaccctcaccacgatgtgcccgaggaaggagccgtacaaggagggggagaaggagccgcgccacctcgacatggagctggtcgggctcgtctacgaggaggtcgaggcggcgagggcgaggaatggcgctggtggtgaagcagcaggcggcggcgcaggggcaagggtggaggtgctggacgtgacgaagctggcggtcatgaggccggacggccaccccgggctttacatgcaccgcgacccgttcgcgcacggcggcccgcagccgtggatgtcgtccgactgcgtccacttctgcttgcctggacccgtcgataccttcaacgagatactgcagcagatcctcaggaacaagcggtgaaatcatgcatgcatgggagattcacatcgccgacactagctacttagatgtgtagattatgcacctttttttttttaatttgttgatacatgcatgctgcagagtgtgcatagtactgttgcacctttttgtttccccccttcgtaacttgttccatccgtggccgattcggttgataaaaggttaagtgaacaggtaggagcttcttccgaatagccagagctgtcttggctccttaaaatggctatggcatctcttctttttttattaaaaaaacggcttctccttcggagcaaccggagataagccctactaaacatgcccaaactatgctaaattttgctagaatagaagatggtttaatcaacactattgtattggcacctactgcatctcacaatcgtagcaacttgcttatttgagagtttctgactgtcagcagtatttgacgctgaatcgtaaattgatcagcagtacggttatcaatctctcatgttttt

SEQ ID NO: 5032 - DNA, 4978 bp, Sorghum bicolor
tcctcagccacgctgggccgatgccctataatttgactttcagtacgtacaaatacggtgaaaagagcttcaaacgtcttatatagtcttataatttagaatgacgaaaaaagtacataacaaatttaaagaaatctaagtaactaagactaatctaactatattaatttataatctaagatatctttttactatatgcgtacttgttgcgatacgctacgcaatagtataacgactacagtgcactaccctttacatcctcaagttgtagtgtgtcgataatgctaaaaataatattaattaaaatttttgcatatatgcaagccactgctcaccctaccaaattatacaaggtttaacgttcaattttccttaaggataataaaacttggtcaacgtaatgggtgttgaatatgctcttgtaagtgctgacagtgcctcatccgagctttttctatttgatgtcttggaattcaagcatatcttctatgatattcaatagtactccttggtcttttatgaggtgttgatcacttgatcttcaggttttatttgtccaaaccatccttgcatctaaatgaactaaaatcttatatactagcagacaatattagtccattttgatcatgctgtcattcagtgaccaaaaccacatatggcacatatgctaggtgccattttccttatagatgggaccctatcctctgctaactttttgttcctagtgaacgaattgagacaccaatttagggtttactaatgatagaaataagttattgagactaatatgtgttttgcataatttatttacattgattggtcatattgatgaggtccatgtccacataagtatgaatgcaaagaataatcatgaaaggtaaggattttatatagattttaagcgcgtacttggtgtcaggatgcacttagaagtagaatatgtctttgttctcctcgagccattgaatgcatctagaccttagtgtggcaaaaataggtttttgatgatcgatgaatacaagtatttgtgactaacatgtacaagaatagtgagatggaatgttgactgacttggtggtttagagttggtgcctatgagggactaaagctatacgttgagaggaggcgacatgtaggatgaagtcaaggaggaggcttggccacgaccttgttgatgagtcgattatcctaaggttgcaaaccacaacaatatatactagaatcactatctctctctcttctttatttttcacttatgctctttgatagactacatattttagtggcattcagttagaaggactgaacctaagggcttctcgatccagtggcaaggcaaaaacgactcacgatcctagctggaccacgatgaatcaaattcatacaagtgcactaatcgactcaatgaaggagagagaagaagttggctcatattcttacatcggctcgtcatgattaaaaaaagtctgagagagacaccaagagagactagagactgagacgctttgcatgatgttttttattcgtgtacacacggctgcttgcacgagaaattgacccatcactagagaaagcaagagtcgaattaaaccgaatctgccagccatttagcagtgtttttctttcacaataaatcagtcatagtactttctgccatggcttatcaaccttgtacacatagtttgtagacttgattgagtttaaactccgatcttgtgtaatattattttttaacaatttttttacctaaaatcatctaaatatataaaagtacacgcaataaccaaaatatcatgtttgaatattttaaaaagatgtaaaaattgaattaggtatgaagaaagggaaaattttcccgtattcttttttttaaaacaaattttcccgtcaagcgaagtcgaatctcgctccagcgcctgtgccaaaacggccacccaagagaagtcgaatcccgttctcaggccccagcttcaaaatcctggctccaccgctgccgccggatgatccccagccgctgccgccgcctcctgccaaccttctcacaacccaatgtcccgctccgccgtaacctggccgccaacgcagcgctgcagtggctggacgacgagctcgcgtcgctcgcgctccccaagctcgactcctacgcgtgcgcaaggctcctgcagcgctgcatcgctcgtggtgacgcccgcgccggccgcgccgtgcacgcgcgtgtcgtgcagcgcggaggagtggcgcagctggacaccttctgcgccaacgtcctcctcaacctctacgcgaagctcggcccactggccgccgcgcgtaggctgttcgacggaatgccggagcggaacatggtgtccttcgtcacgctcgtgcagggctacgctctgcgtggggggtttgaggaggccgcggggctgttccgaaggctgcagagggaaggccacgaggtgaaccatttcgtgctcaccacgatcctgaaggtgctggtcgctatggatgctcctgggcttacctgctgcatccacgcctgtgcatgcaagttgggccacgacaggaacgcctttgttgggtcatcgctgattgatgcctactcgctttgtggggctgtcagtcatgcgaggtgcgtgttcgatgggatcatctggaaggatgctgtcacttggacggccatggtttcttgctattctgagaatgacataccagaggatgcgcttaatactttctccaaaatgaggatggcaggtgccaagcctaatccgtttgtgcttaccagtgtgctcaaagctgcagtttgcctgtcatctgctgtgctaggcaagggcatccatggttgcgcagtcaaaacactttgtgatactgaacctcatgttggtggcgccttgcttgacatgtatgccaaatgtggatacattgaggatgcccgcactgtttttgagattattccccatgacgatgtcatactctggagctttctgatatcccgttatgctcagagctatcagaatgaacaggcatttgagatgttcctcagaatgatgcggtcttctgttgtgccaaatgagtttagtttgtccggtgttctgcaggcttgtgctaatgtcgcctttttggatctgggccagcaaattcataaccttgttataaagttaggctatgagtctgaactatttgttggcaatgcactaatggatgtgtatgcgaaatgcagaaatatggaaaattcacttgagatcttcaggtcattacgggatgccaatgaggtgagctggaacacaattattgttggctactgtcagtctggttttgcagaagatgctttgagtgtgttccaggaaatgcgtgctgcgcatgtgctctcaactcaagttacgttctccagtgtgctccgggcttgtgcaaatacagcatccatcaaacatactgtccaaattcacagcttgattgagaaatccacattcaataatgacacaattgtttgcaattcactgattgatacatatgccaagtgtggatgcattagggacgctctgaaggtatttgaatctataatacaatgtgatgtagtttcatggaatgccataatctcaggatatgctctccatggacgagccacagatgctctggaacttttcaacaggatgaataaaagtgatacaaagccaaatgatgtcacttttgttgctcttctgtccgtctgcggtagcacaggcttagtcaatcaaggactctctctgtttaactctatgacgatggaccatagaatcaaaccatctatggatcattacacttgcattgttaggcttctgggacgtgctggccgtctaaatgatgctttaaagtttattggggatattccttcaacaccatctcctatggtttggcgagctttgcttagctcatgtgtagttcataagaatgtagctctgggaaaattttcagcagagaaggtgcttgagattgaaccacaggacgagacaacctatgtattactgtcaaatatgtatgctgcagccggaattttggatcaagttgctcttttgaggaaatcaatgagaaacataggtgtaaagaaagaggttggtcttagttgggttgagatcaagggggaagttcatgccttttcagtgggatcagcagatcatccagatatgcggataataaatgcaatgctggaatggctaaacctgaaggctagtagggaaggttatgttccagacataaatgtagtattgcatgacgtggatgaggaagaaaaagctcgcatgctatgggtccatagtgagaggctggctttagcatatggcctttctatgacacctcctggccatccaatacggataatgaagaatttgcgttcctgcttggactgccataccgtgtttaaggttatatctaaaatagttcaacgggaaatcgtcgttagagatatcaatcgctttcaccattttgatgaaggaatatgctcctgtggtgattattggtgatgttctatcattcattggtttatttgaacataggatagcatatcctatatagtgctaccagtacaattttgtaggaaagcttctttccatgacaagatctccaaaatatacatgcatacttgattttctggatgaactattctgaagatgatatgttgcttgatctgaagagtactgctgctgatgtcctgtttggcaaaaagtggtggagaccatgtcttggcaatagcactggagctcgctaccagtgcagctcccatgcctccgccacctgtctttgctcccatcgctgactcctactatctctggccccaccacagcctctgcagtctctggacccaccgctgcttgcagatccatcctggatttttgattcgctgcagtgaccatcactgtggcattaaggacgacgaggctgagttaacaatgctgctgtgatacttgcaatgggggagcttaatgagcggttaataaatcatctgggctattacatctgcagt

SEQ ID NO: 5033 - DNA, 7248 bp, Sorghum bicolor
acaatactatacatcaagacccccgcttagcgtggatctagtcgccgccaaagctgagggcgagaagcctagatcacccatggtcagccaccatggggccttggtcaaggccaagcttttatagtcttgtggaggatagaagggagcatgtagaaaccatctattgtcgcttggtcacagcggtggtgttgcttctactagcctacttctttggctatggtggcgcaagagagagtggtgatgacaacatagagggagtagggaaagaagatgagaacgagggacgacatgtggaccccaaattaccatatgtggttcatataaaaaagacaatttggacctatatgtcttaattagcaagtttggagattcgaatatgcaattttggaagttagggacttagatgttaccttaggccttgtttagatgcgaaaagtttttggttttcgctactgtagcactttcgtttgtttgtggcaaatattgtctaattataaactaactaggccttgtttagttgaccccaaaatccaaaaaattttcaagattccccgtcacatcgaatcttgcggcacatgcatgaagcattaaatatagacaaaaacaaaaactaattacacagtttgtctgtaaatcacgagacgaatcttttgatcctagttagttcatgattggacaatatttgttaaataaaaatgaaagtgctacagtagcgaaatctgaaattttttcggaactaaacaaggcctaggatcaaaagatttgtctcatgatttacagataaactgtgtaattagtttttgtttttatctatatttaatgctccatgcatatgccgcaagattcgatgtgatgaggaatcttgaaaactttttggtttttggggtgaactaaacaaggccttattaagtttggggacccgaatatgtaaggccttgtttaaatccaaaatctttttggatttggacactgtaacacttttcgtttgtatttggcaaatattgtctaactatagactaactaaacttaaagattcgtctcgcaattataggtaaaatgtggaattagttattttttatctatatttaatgctctatacatgtgccgcaacatttgatgtgatgagaaatcttaaaaagtttttagattttgagtggaactaaacaaggcaattttaaaagtttagaatataaatagcatcgccgtgtaaatgaactcaatgtcaaaatcttgttagtactaaatcagcatgccatggcatatggagcgggtttaagacacacttgaactaatatcaagtccataataaatttagggactagaaattaaagccagaatgtattttactgccttggacagacaccgcagcatagatttctcattaaatctttggatatatgtatgaagtattaaatatagattaaaatataactatatagtttgtctataatttacgagacaaatcttttaaacatagttagattacaattgaattttttaaatttaattagtctataactaaataataattaacaaattataaacgtaagtattaaagtaggcaaagtaaaaaaattcttgagttcagggcacaccaaaaccgcacgcgcgccgcgcatgccttaggccttgtttagtttacctgaaaacaaaaaggttttcaagattctgcgtcacataaaatcttataacatatgcacgaagcattaaatataaacgaaaataaaaattaattacacagtttatttgtaaatcacgagataaatcttttgatcctaattagtctataattagataatatttacgtactacactagcgagccttaaccgagatcgaccgcggctcgccggctgccccggctcaccccctctcctccttgccagttgccactcccgcccccgactactacacctctgctccgatctgccgagctcagggcgcacatactaataaaaaattaacctctccatcaaactgcagcttaaactaatcgcacggcgatctcaggatccgacgagccacccggcatctcgtgctgcactcctctgctcgcttcccacggaaccccgctcgtcgagatccaaatccagcgccggaatgcccgaggcggcggtgcccccgccgctgccgctcctggcggcggcgagctccccggtggccgccgcgctgccgcgggcgaggcggcggcagcagcagcagcggagggggtggcggcgcccgcgcgggttgctggtctggggcgccctcgtggccttcttcttcgtcatgaactggtggatgttctcccgacttcaggacccctcggcgcgcccgcacttccggctgaggcgccacccgccccgcgcgcccgctactgtcaattcgtcgctcttgactctggtaatgcagtggttggccttctttactgactgatgagtgtctagtagagtagctatcatccggttcggttgatgtgattagtttgctggggcgattgatatatggtgatgaccccgtagctatcaattcaaagtgttagcttagccaagagagtattttgcactgggggagagcatgagtgttcttactaatttgtagtcaactagccataaaaaatactgctctattgttcagttgcaattttgtaattctacatctagcttttaataaattaattcaggctaaatctccagtaacattaacaaagtcttcaaggcacgatattatgacgttatcttgcacctaaagccatactcgctccatttcaaagtgttgggcgtattagaataaaacaaagttaaatattattttgaccttcgatttatcagaacatttgcatgtttgggcagatgcatcaatagattcatacttcacttgtcttttattttagtatggtctgggttttagagtaactgataatatattgtactgtaaattaatggccaaagtatatcttgaaagactttctcaaatcctaatttgccttattaaaagaaatggatagagtaatgtattgtgataatgtaattcttgggtgccatggcaaccgctgctcacttttggtgtttatgtacattatttcttacgcatggttttcattactggaatgttttaaggaagaggtgtctggtgctgctaaggggaagagggcacatagggttatgctcacccggttgcttgctttggcaggccatgctttggcagaggtaacataataaatgaagctacatgctctttacatattctaaactggccatatattgcacacacatgcacattgaaatatgtcattggtaatgacataatgtgtaatgctaattacctaggcagagaccaggcctgaacctaaggatttgtgggaagagccgataaatgctactatgtggagaccgtgttctgaccaaagggattggaaagcctcaggtaggtgctgatttatgtttctcaatgttattggtgtgcatttatcttgatagttgcattggtttatttttcatatttccagcatatgtttgatccagtgccttgttcctttgacatctattctttgtaattgaagagggaaccaatggctacatcatgatcagtgctaatggtggcataaaccagcaaagagttgcggtgagttgttcagtaatctactaacatccttaacattgctggcaatcgtagcaaatctgcttggagaagtttttttttttggtgtgtgaatttgttttgcagttatggcatcaatttcaatcttctttttccttcttctgtttaacagatttgtaatgcagttacaatctcgcggttgctcaatgcaactcttgtcatcccaaaattcttgtacagtaatgtgtggctggacaaaaggtacacgtttttttaaaatacaactttgtcttatgtttaatgttttagatagcttatttcaataactgattattatattttgcataaatgacaaattgagttcaatatcttagtcagtttggcgatatatatcaggaggattattttatcaaatatctgaaatctgatattcagattgtaaaggatcttccagtagagctgcagtcattagacttggaggcgattggtagccttgtaagtaactaacctcagttttgtcagttatagaaagtacattggtagaaagatgaatttgaattcattattgtttaacttttcctctgcaggttaatgatacagatgtcatgaaagaggcaaagcccagtttatatgtgaaaaaaatactaccaattttactgagaaacagagttgttcactttataggatttggcaatcgcttatcttttgacccaataccttctgaccttcaggtattactccaactagtaatgtgacgtaagttcattttggacactgaaatgttctcttcaacattatttgggttggcaatttatttgtgatatatctgtagaatctgataaaattgacagtaggaaagtattttctgagacaaatctaatatgcagtaccattattgacctatttatgtattcataaagatagtgtttgtcataataaaatattcagctgtgcctgttctagacatctagtacactcttactctgtcccaaaataagtctccaactcgcatttcgaggagtcaaccaatctcagctataacgaagtttatagaaaattgtatcaaaatttgtatctccaaagtccaaataggtttactatgaaatacatgacataattaacctaatgatgtttatctggtatcgcaattattagtacttttttttgtatatattcggtcaaaattgagattgtttgacaccttgaaatgcgagatggggacttattttgggacggagggagtactttttactggagttgccatattgtgctgattgctaccaataccatttatccgcatatcagagtttgttaattttcttgaattgtttcccactatgatgtgtttacactcttactgagataggaaattgttattttggtatcattatttagaatcgtgtagtactctagtgtaacttacttgatgttctgtgaagatatgattatttgacactaaactcatgatgcatttacacttttactgggacaggaaatggttattttggcatcagtgttatagaatcctttagtacactagtctaacttatatgatgaactgtcaagatatgaatgactcaagatagtactacagatgaatattggttactgtgctgctgttttcttctctttgttctgttcctcccataaggaaaaaaaaaacaagtgcatgctctgactgtatgggtactgttccacagagattgcgatgcagatgtaattttcatgctcttcgctttgtacacaaaattcaagaaactggtgcagttcttgtagagaggttgcatggccgtagggcctcttcgtcgcctttgaaggataatcttttaggccagtttgccatcaagtctgaccccagtgcgaacaagagtgatgcatccaaatatctggctgttcatctccggtttgagattgatatggttgcatactcattgtgttactttggtggtggcaaagatgaggaagacgaactagaagcttatcgccaaattcactttcctgttctgtcagaactcaagaagacaacaaagtatgtttgcagttctacattacatgacaattaacaatattgaacaaaaatgacatcctaatatttaatctgttgctgcctatttttcatcaacaagcatttctgacagaactgtatcttgttaggttgccctctgctgctttcttacggtctgaaggcaaatgtccccttgcacctgaagaggctgtgcttatgcttgctgctattggtttcaagcgcagcacaaagatatacattgcaggcgctgaaatttatggagggaaggataggatggctgccataagtcgtctttatcctgctttagtaactaaagaaacccttctgtctccatcagagcttgaaccatttaggaacttctcatctcaggtaaatttccgtcagatatgtgacctcttcttgcattatttagttagaaagatatatagacagtgttagcatgtaaaaacgtagaaaataagcaaccaaatagaaaattcaggtagtagctacctgattatttgtttgtagattgactgaatagattatgtcctcagactgctgctgtcacataaatagaggctaaaaggtaaaactgtaaaagtcaagaagtgctagttttattttctgctctcaatttagaggtaattcatgtgggcagcaaaccagtaacagaagtgcttattttattttctgctctcagtttagatttaattcatatgagcagcaaacctgtaactgcaagattgacatgaaggataagaaaatggttgtgatatttgctaatttacattagtatcttgtgaactatggctacgcttaattgaataacttctttatgctctggtttgcagttggcagccctggacttcattgcatgtgcagctgccgatgcatttgctatgactgacccaggaagtcaattctcttctcttgttcaaggttaccgcatgtactatggtggtggggaccttcccacaataaggccaaacaagcgccggctagccagcatacttgtgaagaatgccacgattgagtggaatgaatttgaaagtagagtaagaaaactcatacatcaaactaagcaagttcatgagaggcctgttgcaagaagcatatttagacatccacgatgttcagaatgcatgtgcagaacagagcaataggtttttttttgatagtttcttgtgtctataccaatacttcttttttagaagaaagactataccaatgagataagactataccaatgagatgccgaaggtagttcttttgtgcttcagaaatctggatatatctcttgcccttgaactactttggaatcaaactgtaaaaaagaaaatacagtgattgagctcttgtttgtatcagagaagcaatatagctgactagctcatccattctcttactgccatgatctactgctaggcatcatgttggatttggatttttggcagaattttgtctcatgtttgatggaagtagaccagggactaaattttgcatctggacaacaatgccgccatatttttgattggggtcagctaaatcattctgtgaatgaaggtgcatcatctgcagctgactctggaagtaatatattgaccaaactgagcaacaacattcttattgttgatattgctaattggctattgctatcgtgcct

SEQ ID NO: 5034 - DNA, 8197 bp, Sorghum bicolor
acacccatagttaaagtgcattacatgataacacattgcaaagtctaacactaaacaacgttgttcatgaataaaccatggaataagcaggtcatgtaaactactgagtgcaacgagacgacttttccttcctctgggtatcgagattctcctccatcactgccttcgctcgatgcacatgctcaaccgttttctccctctcctccctatatgcagcaacatgcctcctttcctcctctttcttgtgctcctttagagcctcctctttgtgtctcttctccaatctctttacaccatcccactgcttcagaccttgtagaagctgcttgtccaattccttgttcttaatgtcattccactgctcaaaatcacacaacgatggaggggtcgataacaaagatagttgttacaaaacaaataaatcatacttcatatgacacaaaaaacttaatgcacaataaaaaaatctcacaataaagttattgcggcgctattgtggtgtaggctcccatataaaattggaacacatacaatacctctacttataggttttttttatctttcagaaatttccaccttagaatgatcaccacaaaaatatatgggtcttagaacaccgctagggagaaggtttaagtcgtaaggacttccggtcatcggatcataactacaattgaaacaatgtcctctaatagtcgaaccaaaaaacatcagcccctaaacctagggtttagcagacaatgcacaacaatgaacgcataccttggtttgctagcctttccacgtcttggcatcctatgggtgtatattccaaataaattttaaaaagaacatgaaacaaattttattattttgagttgatatttttagcatagttgtgatttggtgatgtacacaatttatgattttttcaagatttttagcgtcctacaaatacataaacaaattaacaatggttaactttgtttatttatgaggagaggtaaaatagtcatttttaatgcaaaacaatattttactatgtggttctcatcatgtagagtctaaaagattttaggataaattttgggacacttatatgattttatatttattttataaaaatattttgttagttacggtatccaccaaccaatttgtcaagaactagagttagaaattactcgaaaataggtgtatgaatagcaaagagccatcacttggcatgtccaacaataaattttgcctttttttattgtagtgcgtgtctgcgtgacatcaattctaatgattctactgaacatttgtcgctgccaaaacgatatcctcagcctctatcaaggccttgtttagttcaaaaaaatttgcaaaatcgacactgtagcactttcgtttgtatttgacaaaaattatccaatcatggactaactagggtcaaaagattcgtctcgtcaatttcgaccaaactgtacaattagtttttattttcatctatatttaatactccatgcatgcgtctagagatttgatgtgacggggaatctgaaaaaattttgcaaaattttttgggaactaaacaaggcccaaatgtttgtgatggcttacgtcttctaggctaaaagaggtgctctatcgcgagctcggtagcacacaccacacaggatggcacgtcgatccgccggaaaacaacgagcaggcgaaccgaacggcagcgacgtcgacctgcagccgtaaaataccacggccaacccaggttccaagagacaggccagacaaacaccgtggatcctcatctgtgcagaactgcagatccacccaggaaaacttcgtaatcaaccaccggcacacaagaccccatccggcacccagtacagacccttgacacccaaatacgccacttatatcaggtaccccacggtaaaaccaccaaaacgtcccctgccgcggcgccgctcggaccaaaccgcggacacgccacgaacccaggggctcgccaacccccacccgaccagatcaccagatcgccatcgcgccccccataaaaaacccgcacgacggcgacgggccctttcgcttcgcccacggcatattcccccccgaaccaaaccaaacacaacacccagatcagcgaaacacactccgctccgctctcccgaaaccggacggacgcatggcggcggcggcggtgacgtccaacggcggcgcggtggcggcgaacggcgggccggcgcccggccggctggcctccgtgtacagcgaggtgcagacgaaccggctcctgcacgcgctgccgctcccctccgtcctccgctccaacttctccgtcgtcgacggccccgccagctccgccgcgggcaaccccggtgagtgaccggtccgaccgaccgtcccacgctgcccgtatcttcggatctcgggccttgcgtgcgctttgccatcgagctcatcagattcgatcgatctgtcgcagatgagatcgccaagctcttccccaacctcttcggccagccctcggcgtcgctggtgccggcggccgagcccgccgcgaccaggccgctcaaggtcggtgtcgtgctctccggtggacaggcgccgggcggccacaatgtcatctgcggcatctttggtgagtacatatgcgttggcttcccgagcttttcaatcaatcacaaaaaaaagatatgccaaggccttgggtgctaatggaggcgatctgaggttgatggtagattcaaggaagggtagtgcagtcaggtggagatctaaagagtactccttgtttctttttcagtaatgtatagtgtctttaaatgaggtcccagtgaactcgcgcagctgtagatctctgtggattttggtagtatgatgaggctaaattgactgattcagttgttttttttttgagcgagtgaatcttcttttggatttgcatgcaattgagtagacaatgaaagagtttgactgtgttttgaatttcctgaagcaattcttgtgtttgacttttctggtgtgggttggatcagattacctgcaggagcgtgcaaaaggcagcaccatgtatggattcaagggaggcccagctggggttatgaagtgcaagtatgtggagctcactgcagactttgtgtatccctacagaaaccaggtacagcaacatatactttattaagtgtattgctgactgaacattttaatgatgtttacttttgtttaaatcatgtttgtttgcctgttagtattaggtaagattttggagtaggtctttcgtgttgcagttgtctttcttatgtgttgaccactgttaatgttttcgcaaaattgttactttagtactttactaacaaagcgtgattagttaagcaaattaacctttgtattaatgaactatcatttattgaattatcctttatatactatttccttttgatcatgcatttaaattttgtttctttttgatagggcggatttgatatgatctgcagtggaagggacaagattgaaacaccggagcaggtatgtctctgggctctggccaatgaccatgttcatgtgcaaatgcttatggaaaaaatttgctactggattgcctaatctcgatcattttttttttctcaaatacctatgttgcttgtgcagttcaagcaagctgaagacacagccaacaagcttgatttggatggtcttgttgtcattggtggtgatgattcaaacaccaatgcctgcctccttggtgaatactttaggttggccgctaacactctgttttggtgtttcaatataaggctgacttgtgaatatacattgcgtcaattgtttctttttctgcttatccacaagtaaatcaagattatgatttcaaattatgaactttgctccataggtcaaggaatttgaaaacccgtgttattggttgcccaaagactattgatggagacctgaaatgtaaggaggttccaacaagctttgggtttgatactgcttgcaaggtactgaattcttgatccttgtgttgtgctcgtctcacagtatcatgcatgcaaatcttagtctagatttttaattagctacaatggtgatggcacacctgcccaagcattctttcaatttgagaaattaagacatcctacacagatgcatttgaaaacccaccatgaaaatatcatgacaaagactaatcttctttttcagatatactctgaaatgattggcaatgttatgactgatgcgagatcaacaggaaaatactatcactgtaagtttttcagtagcaacaaaataggttgtcatttaataattaaagactagtaagttgctatattgacgtagtagtatcttgccatggagcatttttgtttttgacattatagagcagtgctaacatgtaatccttgaatgttggaagtatagaacggaactacagatggcacattttaacatttttgatatttttttgcaataaagtttttaacaagtacttgctcttgcagttgtgaggcttatgggtcgtgctgcttctcacattacattggaatgcgctttgcaaactcaccccaatgctgcactcattggggaagaggttggtatttcttacatgcaaaattctttctacatggaattagcatgattgaatgttcccgcctttatctagccagattagatacatacaatgacacaaaaggagagtgtaactttctatgcacaagtatccatattttatgtttagagtaaatttacagaactacaactaatttgaactaataccccagaaccacaactatcttaacatatatcattaaaccgcaatggttttggcatttggcacctaccaactttctcataactgcccagtgttaggatagttgtagtttggtgatacatgttaaatcagttgtagttctgtggttccaagtgtcaaaatagttgcccttttgtgatacatgttaaagtagttagttctgtgggtcttagttcaaagagggagtattgggcgcacaagaacatattggtgcaccgtgcacatgtgcacaaactcgatctcatccattgtttccaatctgaatgccccaggtgagaggtgagtatcctcccaaccctctatggctggtccaattagatttggtccaactaaaatcaaaggtgattgaggaggggattatcacctcttaactgggccattcagattggatcacatggacgagattgagtttgtgcacatgtacaccatctgatactccatccagttcaaatttactttgtcttaatgcagtttttttgtacatcttctcaaattgtggaatcttaagaacaatttagcagactagatttttgtctgtatctgataggttacattttctgacattatggctttattgtttgttcataattctgtgcatcattatttaaaaaataacgtcttcttcgccattgtaggttgctgaaaagaagcaaacccttaagaatgtcacaaactacatcactgatatcatctgcaagcgtgcagatctcggttacaactacggtgttatccttataccagaaggcctaattgatttcatcccagaggtttgactctttttatggtctgtgactttgtgttgccatagactatattactgacatcacttcttttcttttgcaggttcaaaaactcatcgcagaattgaatgaaattttggcacatgatgttgttgatgaggcaggggcctggaaaagcaagcttcagcctgaatcaaaggagctgtttgagtttctgcccaaaactattcaggagcaacttatgcttgaaagggatccccatggcaatgttcaggtaaagactgggaatattgaccttcttaactttcttggtctcttctgataggattctttctgctgaaaggatatcagtaagctagacatgctcacttgtcttgttattccaggttgcaaaaattgaaactgagaaaatgcttattagcatggtggaaactgaactggagaagagaaaagctgaggggagatactctgcacatttcagaggacaagctcatttctttgggtaagcctgcctttttttttttttttttttgcattttgtgaactaagcaataacgtggttcgtagtctcccaccgaggaggccacccctgagaattggtttcagggagtttcctggccagctatttgggtactccacccttttaatacaaagccagggaacctcatctccctgcagtggatttttttattaatattgcatttccgaacctattccctccaactctctctctcatgcacttctttgttatttgcaggtatgaaggaagatgtggccttcctactaattttgattctaactattgctatgcattaggctatggtgctggtgcccttctccaaagtgggaagacaggacttatttcatcggtacaacttctcatcttatcatcttatgtgacatactcaaatgaggcatacttgcactgtaccttgtaaaatctgtgaggagctctgtagcacagaaaagataggcaccagtgttcaaattatgtaaacatcaccatcccaatattcaaagttgcctagcaaatttttacatttggtttcaccttgcgctgtaaagttgtaacagctacaaagtcatggcatgtaggcacatgagaagtttgcaaacagacacctacagtattaggagtatctgggagatctttttataatgtgattgtggctgatcttatgtacttgcatgatttgatcgctgtcttttttttcttggctcaggttggcaaccttgcggctccagtacaagaatggactgttggtggaacagcattgacatcactgatggatgttgagaggaggcacggtaattttcttgcttcactttgtttccaactgatggctactctactatgttcttgtaacattcttctttatgtttattcaagtagcaaccattgtttgacatgccagtcttgttcccttttgggttgattgtcattttatattttggctataatttgtgctgcatcatttgtcacttcaagtgtaacttttgatattgttctctgcaatcaggcaagttcaagccagtgatcaagaaggctatggtggaacttgatggtatgaagaactctcgaatgtttgcttgatttactgatgattatgacgttttttatggtttatttatgtcctttttccaaatctgatatcatgtgacgtcaatttccagctgcacctttcaagaaatatgcatcaatgcgggatgagtgggccatcaagaacagatacatcagccctggtatgtggaaatgaaattgttagcaatgatgatccagtttagtctttagtgggccccatacagttttactcacatatcgttctcatgacacaggccccatccagttcagtggccctggaagtgatgactcgaaccacactttgatgctggaactcggtgctgagttatagagatgcggctttttttttttacttatttttgttcttacagttttgggagtggagactgggtacacgggggtctcctggagcagcctgcagtctccatattgtgaattgtttaataagtgcttcgatgggagttttctgcttagcggactggatgtggtagcaaataagaactggtttaagttttttgtgtgatctacacaccaactgacttctcttgtaaccctgttcccctggttgcaatctcgtgaatgaactaatgaagttgagccacgatttcggtttgtttgcttccggacttccgggagcagattattatacattgttgttcctgaattcagagttgcagcctgcagccattgcagaactctaattattcattaggccatcgtagcaaattatctaatctaactggattactccgtacggagtgttgcatgaacgaaccctgaaaattagtttgtacttaatgagtaattttctaaaaaaaaacttcattagtgaagctaagctgtgccaaatagagcctaataaagctattttttttttagaaaaatagcttcatgagtaattttctagatgaagctgagctgttttagaaaaagtgtttagtaaaatagcttcatcaactactttttgcatagacgagagagctacaataaactattttttcagttttatcctaatttatctttacgagagaagaaaaataactgtttagaaataataccaaacaggcgctttgtatgctgtcttctatgcccagtcacgtg

SEQ ID NO: 5035 - DNA, 4532 bp, Sorghum bicolor
ctgccccaccgccttctcctcctcctccccctcctcctcctcttcctcctccaccaccaccaccaccagcatcacagtctcctcctcatgcacctgttgctgcacagtcatgggacactgaagccgtagcaaaagaaggcgcttctgatggtggtcgttttgcaaaaactctggaaccagctactcagctaattgtttctgatgactcagatatggatatggatggttagcactcccctttccctcctcccccatctcagtacagtgatacttttactctgtttgaaacttgcattttattcacactgctgcatttggcgtcacagcaatgacaactgatagttcgtacgatgaaaaacatcactgtgcatgaatgttgtacctgactttggcatttcagcttaattttcacttcatcatgtttctaaacatttattttgtcatggcaatttccaggggatgacgactctccatcaaggcagccccttaccccagagaattcttcgctcgtgactgctgaatgtactgaaaatgttgatgtgtcgaagtctatcagtgatgtttcaagccctggcaaggatttgccacctggtagtggtgagaatgctaaaactgtgcatgcaactgaggatggtgggagcgcattccgactaatacaaggttatgcctccgatgacagtgcaaatgaggccgatgctggtcctcaggataccagcaccctcgtgatattgcatgaagataacatgcacagtcattcaagtgatccacatactgaggtcgattatcagaaacatgttgatgcaaaaggaaatgtgagtacccctcatggcactgagcaaaatggtaaggctgaaaattatcatctgaaggatgagagcaacccagtgaagcatggcacagatgtgcttgggcatctggccaaagaagatacaagtgatagtgaatttgagggaagtcaaagtagtgaaaggcatgggaggagacaaaagaaacgaacccggagcaagtcacctctgggtagaagtggtagtccagtgggggcaaacaagtgcagcccatcccaaaggtacgatgccttgtaccttaccttgaactttaaatagatgcatcagttcatctgtgtaattgtatttctgtatttatatttgttataagttatggcattcgatatgtatatcttgctccctttgggagtctaacagtattaaacttgtttcagttgctcacctggaaagcagagcaggccaccatttgctaagcgggttcatcctgctggtgatggcaatgattcaggaggtaaagttgctcagcaagagggcctggcattgacatcaaaattggatagttcttctaatgatttaattggcaaagtgggagataatggtgcgtttgatgttgcccttgggcagcattgtcacagtgacaatttaatttctgagcattcacaaccagtggctgcttctgctggtactcataagatgcaagaatctcgatcggacttaaatgtgtcttcatcagcaggtgacccaattcttatgagccaacctgcatcaggtgtctcgtatatgtctgtacaaactaccaagagctccatggcatctgatcctctccagtctcatcctcagagtttgtgtcctcctgaacacatgtcatcctcaaatatgattcagccaccaggacaaccaacatttacaacatcagaattccctcaaatgcagttccagcataaagttattgcaccagcaaatgagttcctgcagaaccagatgagaagctaccctccacaagatgtgtctcatcccagaccattcaatttccatcatcatactctcccaccagcaattccttctaaccagcagccttctggtgtaggtctatcttattcatctcatcagcctccatatggtcagcaccaacctcctgggaatctggattcaggaagtaacttggtttatccctctttccagagatttccatcaaatgtaccaggaagtaacaatcttggtcccctatctgatgttgatttgactaaatcgtctatcaaaccccactacaatccatttgcatcaacctttgataaaacagatccaagtctagatattggggatcctgtaagccctaatgcaattggttctgtttccacaacagaacacatgaatacagtgtccccttttggtcgatccagaacacatgcccatgaaagttctgcagaacctgtgcccattaaacaaaagttattccgtcaggagtttgcttctggtgctccatatgatccattgcttgacagtattgaaccatcgagcagttcaatcaacaaggtagatcttcgtaaagagaagaactggagtgctgctgatagtcgtgatgcatcaaaacttatgaacctagaagtggacagtgaaaatatgtatggactgggggttgttgctgagtcagaagttgagggacttggagaggtggcagcagatactgaggcaggtgtggtggagaatgcaagtcctgaatttttgggtgctaaagactggaactcagatatccctggtgatgctgacaatgaccaaacattggacacaaataagaagggtaaagactccaggtcaatgaaactttttaagattgctattgccgattttgttaaggaagttcttaagccatcatggaggcaaggtaacatgagcaaagaggctttcaaaactattgtcaggaaaacagttgataaggtttctaattcagtccctagcagtcatattccgaaaacacctgccaggattaaacattatgtacaatcctctcaaaagaaggtgaccaaattagtaatggtatgtctatcgtcacatgtctagaatattggttatttgcgtacatattatttctgttcatatgtttgtagcattctgtgacaatattatgcaatagtcttgttcatggcatgtgaacatcatggagaagtggaaattatgccatgcccttgatatttgatactgagaaacacaagtcacaattagttggtgtcatgctattaagctcctaagctctgatgtcctgaagtccgtgttatgttgtcatccagaaatttggtaattatttagtggagttcggtaatgtcacttaattgagtatattgtctacatttatcttgtttggtcatcatatggcaataatttgtttcatcacttggactgacatcttggtttaagtttctgaattccatcatgggatttaaaatctgtctggatcaataggccccacataagtggatggcatacatgtcaagttagaaatagaaatgtttcaaactatctgattctgtgcttgcaagttttgagctcacatactttttctggaatgagagctttgtatcaccatgtttacttaagaaaatgtgattcagcccccaaatctaatatttccaaaccaacggtaccatattctccattagctctctaccgtgctatttttcttgttcagcacatgtttgtttcaataaatatctggctccactgacttggttttatttttcttcaggggtatgtcgacaagtatgtgaagccgtagactaatggggcattgtgctgagccaatcagaactgttaaggttcagagtctgtgctgcattctactaaagaggctgcaaattgggcaaatctttctgcattctactgagagattcattgaggctgctgatagaaatcctcatgtgccggagtccaggacccatcaaaactcgagggctttagtgtctgcttttgtaagaactcataaactgaaacagaacttaaggactcctcagtttacctgcaccaagccttgtctgtgcatttggtgttgttcccaagacgctgcagcctgacgagcacctctgtaaaaaccttggcttggctcctccggtaaagaggaaaaggctgaaatttaagatgagggtaatgtttgcgttgcttcgcttcatgtacagcacaccatagactgtagtaaacatttactatttttcttctcaaagggtcattaccagacaatccggatggattcttttttactagaattgattactgggacgtcaattggtgtgctagcttttagggttaaggattctttgaaaagtgccgtgatcctgcgagtcgattaatggatcgtaacgagctgtgaggtatgatgcactcgtgctaccagcaagtgacctggcatacgcgctggaatttttctgtatcctatgtttttttctatgaaaatcatctgatgcttacaaaatttctgtataatttatgggaaattcctgcgttctaaaaggcctcagttatttgagtctgtcagcatcagtctcgaggattagcaaaaggcagacaaaatttttatttgccgtcatgtatcaaaaacgtaggagtgcctccaggaaccaccccatgagcccatgggccatggtagatccacaagcaagcagctcattaaaaaaatttaaggaaaatgtctacttttcttcctcaattttcacgaaagttcactttttccccttcaactttaaaatcaggtaaattatc

SEQ ID NO: 5036 - DNA, 7079 bp, Sorghum bicolor
cacactccatatatgtccaatttgcttgcatatgataaggttgctcaacagttgtccagggtatatattcaggatttttcaactctactatagttaattcgacctaaaatctaactctgacatgcaggttgtatgcaactatgcacaaaatatacttataatgtgctccatatgcatgtgagaattgcataccagagataagaaaaagagtatgtgcttgtctgattaccagataccgctatgtgattagtctttacgtggccaattaatctacatttagtggataattgtgcaatatgaattatttataatgttttcatttatatttgaaattgattaagacaacttctgttgaatattctacatcgttaccacaggacttttatatcaaaagtctgtcatgtgtgctgtggatgatatcctcaacgggtttctttgcacatgcctctctattttctcagttattgactgaattattctgttttttttgacagccaaagaaagccgaagataagccccaggcctagtgaccaagtcagagttttttatttgttaaactatggacatttgtacactcacaaatgtggggtaaaaaattctctgaccgcggcacttagaaattagaatgtgcgttccctgttgtttgaaggccaggtctggttcaatttttgttgtcccacattgaggtatgctttcagttggtgctctgtactcgtatatcattttagttacaaagcgctcataagcttcatcaagcatctcctcaagctgggcatcacacctgatgtgaacaaatgattacttgcaaacttttgacattgcagttttctttttcgaaatgtaagggtatttgatcacttaattctgtgttcccatggtgtggatgttcagaaaattacctctgctgttcctcgccaggatccatcgcgagcttgagtatcctcattctcgctgtctccaatttcatcttccacatcattttctgatggttcaacatcaaactctgctgattcaacagcttcaagttcttttccaccctaaaaaaaggaaaatgaatataaaagcttaagaattagatgaccatgaacgagcatgctcttttagatgcttttccaagaacaaacctcaggtaaagatagaacatacacagctcattagaaatgttactttacagaaatccaaatagagtgaatcaaatttgttggtctgttttagcaaaaatggaggccactgtatttacaagttattgcatgcacgaactcaagagaggaaaatgtatattgctgtgtacttctttaagtgtaacaaatggggggaaaacaagtttcatgtaaaactaaatctcttccagcgagctattagtataaattctgaggacaggtaatgccactaagtaaaagatagcacacaacaagcatgagccagcatatcagccgtacttttttctgccagccagcagtgtttttctctcacaataaatcaatcatgacttttcagactagtgaacagagctgcgatgcacaatatatgaacctgagtactggtgtttttgttgaacaaattatacaaactgtcaattcttgttcattgcttacccaaagggcagaaaaagggatcaaaaaagaaatgcctaactgattatgtgacttattcggaattggtaagaacaaacatctcaattgcttatacgaaataacagagcaactggtaaaaactttcacaataccaaatctacaggttggatacggcccaagcccaaccagcccaacaaggtgcaggcggcaggagcccacctcgacctgaccctagccactccgccgcctgccccgcccccgctgtttcccgccatttcgtccttccatttcccgccaccccgcctcgctctgctccccagatccctcgcccccttttccctctccgctcccgcacgccacctgctcgccgcccccgctcatcgatttccctcggccgtgcaacgagcaagcggcggcggcgaagcgatggaggaggagatccgagcggagttccagaatagcggcttctccatcgggggagccagctccgaggacgccgcccagattctctccacgcgtaagtacaagcgtccccaccttcccccttgcccttacctggttctaagttggtgctgattcatttatgtttatatggttgtggtgtgtgtggttctgcttgcagtgctcacctactgcatcaactacaagatgagccccgcggacctcgtctccaactgggaggtctattacctcaacaggtcagctcgtcccagataagaatgttgcgaataacaatattgtagcatcttttgcagcttagattaggctagtcttcgtgactgtaggtcgtttgagtgctctgcagaaagggcgtctgctttctatgaaatttgatgattaacatctcaacaccaatgtttattttttggctggagcataaacaaccactttctattaactatgatcaaactttgtttgatgtcttgatgagtcattaaatcccgtcaacattttggtgtgactaaaatcttgcagctcataagttcaatattctcctgtctgtgttaagagatgcctccctgatgattgtgattccagggtccatatatttcctttttgttcttttacatgatgcagctaaggaaactgaaagaactaatttatgcaggcaattggatggcttaaagcttgaaagctcatatcttgatggttttctgtcacatcttcagaatgaagttaaagaaaggataataaaagaagaagccaaccttcacatttactccagtaacgatgtcgacatgttagttccacatatcagattcatttacgtgcatgcttgtcacagaagtacctttgtttcttatttcactgtcaaggaaaaaatataaatataatttagaagtaattgttgcaggctcttgagcaattcacatgcagatgaagtggcatttcatgacacgccaggctctaaacaggaaaagccacctgaagagtcatctaactctgagttaactcctctgacaagtgacagaccatcatccagcagagtggccaaaacaaatgctgatcgtattaccccttttgcaacacgagtaaataaatttacccaacagtatgttctcaatgctgataatgcagttagtgtgccaagtaaaaatgctgaaatcacagaagatgaagtaattagaagaattcaaccaagtcaaagatgttccttacaagttcagcgttcacagcctgaaccaggttgcagattcatgtatgacagaatggaagacagagtaagggcattgctaatttgttttattaattgtcgtaagcatctgctctttgactgcatcccttttccagtttaattacttggaagatcggatacgaaaatcagcaagcttgttttctgcatctgggttttgtggacaacctgcagatgctacccttgcttcagaggtaattgcactgcctagttttgttcttttaactacttaactcatcatcacccctttccttgataggatatccaattatttgcccactgcaggagaaaatgtttgcagtcggtacagtagcttgtgatggggaaggtcatttgaatgaaaagtctatcttgctacagggcaggtgagtgtgcttcttggactcattcatgtgatgatctttgcttagtcaccattttgttgtttcttttggctaactacagaaacaactttttctagtgttcaacactccaggggacagcgtgtgcgccttgacttgaaggatcttgatcacttctctttgtttcctgggcaggtaagcgcagccagttctaatgccatatacattatctactgagttaaattaacacaaatttaaataacaggtggtgggtatcgaaggccacaatcccagtggacactgttttgttgcatcaaaattaattgattccataccggtctctgtggatgctcaacttcctagtgctaagaaacaagctattgataatgaaagcaaccaaaattccgacgctggcactctgtcaagagcattgtcatcggttagttcttgtctgttttttgttcgaaataatgctgcaccaaacatatctgtttaacgaacaattagtatattttgtccaagcttaaactgatatcagttcattgttcttctattttaattatgaatcgcatgtttatactttcttcatttattgcatggacatgctcaatcaaaggagagtacgccaatcattaatgatttaaataatttccattttacctcatgtcttgagaaaaaaaactacctcatgtcttttacaggtcatcgcagcaggtccctatacaacaaccgataatctgttgtttgaaccactgcaagaacttctttcatatgcttgtcgtaagcagcctcagctactcatattggtgaggcctctcaactctgtagatgggacagcatattgatgtttgaaatgccctgctactgtacatatcaattgttctttggcagatgggacccttcattgactctgatcatcctgacataaaaaaaggaactgttgaccagagctttcatgacattttccattttgaaattctgagaaaggtaggtaaatgctgatttctgaaggtgtaatgctggcacattgtcaaatgcaatagttattcatgtgtgttatatttttgtgttcagattcaagactttacccagtatctggggaacactgtccgtgtaattctcattccatcagtgcgtgatgctcaccatgactttgttttccctcaggtttgtaattttctttattgagatttaaatctgatttaataattataaacatattgctgtatcattacttatcaattaatgtctgcaaagttagatgcaaattttgctgacatagtgcaacaagtttacttccaatgtactaggctttatagtctggtagtatgtgcaaatcaattgtgttattgttatttaagcctttttgtaatgttctgagcacaagaatctctaatgatatatctgtattgacgctacttgcagcctgcatttgatttgaattttccagaagatatcacacatcaggtatatatgttactctgtaaggttgctcttgtgaggtactcaatccatcccaaattgtaagtcgtttgacttttttaatatcaagtttgaccactcgtcttattcaaagttttgtacaaaatatcatcttttttttgttgtgtattggtttattaataaaagctcttcaagaatgacttaaatttgactatatttacacaaattttttgaataagacgagcggtcaaacttggggtaaaaaaagtcaaacgacttacaatttgggatggagggagtatttggtaataatattcctttgtttttaaaaggtttacatacattatgcagattacttgtctggcaaatccatgcctcttcagttctaacgaggtacgctatattaatagttgtaatgaaataatgtaatggttggagcatgcaaaatatatatggttttccttgtctattatcgaatgggtacgcctttattttggttaagttatttttgttattgtcctgcaaaataaaattgagacatggtcattgaactcaaaagaatctttttctccatattgtgatcttaatatgctcctcatctctgcatttttctctcatgtttcattgtctagaggaatccattcaatgcttagggattaccaggcctactgccacactgttcctgtgtttgctcatgagatattctccaaatttgtaacttgttgggatttttttttctcgaacacgaaggagagctgtgtgccattatattaagaatggaaatggttttcttaatacttctcatgcatattatgagcaaaattcatcttatatgttgttagaaatgtgttgataagtgtcgtcttacccgaaaatgtttgttttccttctttccagatacattttggctgttgtacagtggacattctgaaacagctcagtggtgaggaaatttctcgcaagccacctgtcggaaagcctgcagacaggattggtagacttgcctcacacatattaaagcaacaaaggtgattccatttagcttttttatgttgtatcagttgggacggatcgtgtgcagtttatgagttctgatgtagcactcttcctacagttactatcctctatatccttctgctgctggtgtgccattagacttctcacttgctaaggaagcactggagatctcatcagcaccagatgttctccttcttccttctgatcttgcaccatttgtgaaggtaataacaagtttttagtacaggcagcacatttattgtaaacttctaattgatattcatatatttgaattatgcccatctgcgagctcattgttcaactgaatggaatgatactgaacagctattatgtgcaggtgctttcccttggagaaggtagtgacgaccagaaacggtttatctgtgtgaaccctgggaggttggcaaagggtattggtgggggcacatttgtggagctttactacaatgagggcatcgacaagaccaacgcctccatcatccgcatataggatttctgtcggggcatatcacctaacatgaaaagaggctctgattcatccgctgcagaaaattacccaaggcttcttttcttgtttgccacaccagaagcccaccaaaaggaaggattgaagcggtaagatttatttttgtggcaagctttcttggggacatgtaaattgagctcggaaagccatctcaacgtttgttatcccagatagttttgcttaacgtatggcattctgttgtaaccaagtactttggacactaaagttcatattattgttaactaacaactgatttgcttctcttcagtcgtaatgcactacctctgcctctaaaagaatgcaactatgggttatgtgccagttaaagtacttcacgtttgaccaagtttctaataaatagtattcatatttatggtctaaattaatttattatgaaaatacatttcgtaactaatctaatggtgtttatttaatatgataaatatttatactattttattaat

SEQ ID NO: 5037 - DNA, 10303 bp, Sorghum bicolor
  misc_feature (7416)..(7636): n is a, c, g, or t
ctagttgtgatgaaaaatctcgtgccatttgtttttgacttttagcctattttaatgatataaggtccgaactgttgaagaacaagtcagggcttcagcagaacacaaattaggtgttgctaatcagagtataacagcgggtttttttgacaataacacaaggtaaatccttctattgtctcaaataatttagcacccacaggtcccagcctcgccctcctaatttatacaatggggtgctatttcagtgctgaagatcgaagagagtatcttgaatcactcctacgtgagtgtaagaaggaagaagcagctccagtgttagacgacgatgctctgaatgatattctagctcggaggtaagatccggttgcttcgacattatgaatgtttgtatttacataacattgctttgctttctgtactgcagtgaagctgagattgacatatttgagtctattgacaagcaaaggagagaagaagaaatggtatgctgaatttctataagttgctttcagctaaagcttctacatatttgccatcttgtaatattgttgtccttacaggcaatttggcaaaaggtggttcaggatggttcaactagtgggctagaccctgcagtattgccttctcgtcttgtgactgatgatgatctcaagcccttctgccatgctatgaaactttacgagccatcatcaaatgtgaaaacagtaaaggtgaatgtgaggaagaagggtgaacttggggggcttgatacacaacattatggaaggggtaaacgagctcgtgaggtcagttgcacactgtctcttaatgtatctttcaattgttgcctaatggatttctttgctaattcatgaatacccatataggttcgctcttatgaggaccaatggactgaagaagaatttgaaaaactttgtcaagttgattctcctgaatcaccccaacctggtggcatgtcaaaggatttggatattcctaataaaggcattaagactgaaattgctgtggagagttcaaaagaaccagaacaaatgaggatggaggcatccccaactgttggggactccccaccagccaaacgacggagaggcagacctaaaaggtcagatgttttcttatctcctactgcagatctgactgatgctgtcaaacaagacacaggaaccacacaggatggtagtttggccacaccagcaagtaccttccattctgatacaccagctactccaatccattctgctgcttcagatgttaatatacattctatttcaccagctgatatcaagaaacaagagttcagtactgatactaagccttccagttctgtctctgttttggaaggatccacggcgaatgaaattggtacaccattacagagtgttcataatgtagcagctcctgcaccaccgcatcaatcagctagggggagaaaatcccaagcaggagaaacacctcgcaggcgaggccgaaaaccaaaatctctatcttcatctggtgtagatgatgttagtcttaacccaactgtttcaactggtagtggggtagcagacactagttatgtttcttcatattctcatgtgaatatgccctcatcacaaggcactgctgtggcactggcaggaatccagaaggatttggtcacagttaaattggatacattgttgccagatagtggtaagaatatttctcctgttaatgaagataaaggtgctactgttacaacacctgtggcaaaagatatctgtgctggaactgtgacaacatcagacaacactatcaccctgacaccgaatactcttaaggaaaacattggattagttcaagtagcatctgcacctactatgcctatgcctgtggcttcagaagaattattgaaaacagcagcacatgttgtggtggcagataagcctgttgagaagcaaactgcttcacgtcgccgcagaaagaaaacatctagtagcgaggatactggagtcagcactagacaaagatcagctatgaaaaaatcttattacagtacttctgttgccattgatgaagttggttctgccatgaccccaaatgagaaatcaggtatagagaaggaaagagatgtcagttcaattcaagatactcccaatcagctgccaaatattaactcaccactgtatgagaagtctggatatgattctcaaccaagcacacctatagctgtccccatcaatgaagctactcttcctagtggctttgatacccgcactactcattctaagataactctagcaacatctgccaatcctgctgatcatgataaaccggttgatttgcaccttaatgcgcctgtttcggttgattcccaaaatcatgaacaactcaagacaggaaaggaccatttggcagtgagttctggaatcttttctactcaattgcaaacagttactgcaaatcctactagtgataataaaccaggaactacccagtttgaaccatctgcttcctctgttcagaattcaggtaaggatgccactgcactgacttcttctgaggttgacagtgctgctccaaataaggcaccaagcaggaggaggaaagggtcaacgcgggaaccacgcaccagaagaacttctgcagcagctgcaagtgaacgccgtgcccgacttactggatcgaagcaggcagaggacacaaagaagttaaagatgtctgcaacgccaactacaacagtgtgtgttttagcggtagagcaacagggagctgcctctttaagagctgaggttaccaatgcttctgtttgtgaagagcagaagaatcctgggagtcacgtgtcttctgacatttcaattcctgtggggagtcatgtgctgggcgcaataagtactgaagaaacaactgccactgtgataactcagactcctgcagtggctaaatcagaagaaagaaaacttccagtaggggatcaacaaggtataatttattacactcagattgctgttcttggtccagatgagaagagtggcataatctttgctattattttccatggtagtggtaacagtggctgacattacttgtgcatatcttgtttttatttttcctaggtattcagtttgatagtacagtaccacaaacgaagatggtatcaaatgatgaaagcatgcaaggtacactctcacacacatgtatctgctcacaagcagttcttggtccagacgagaagaactgtacactgtttgctgtgatttgtactggtcaacagtagtaattgctgatgtttcttatgcatggttttgctgctttttttttcaggtactgaagttaataattcggaacagacaaaaatagtttctgctgctgaaccagcacctgcaaatgatgaacacatgcaaggtactcctcggcacactgtcatcctcacacatggcactattcatcgctgatgtttcttatgcatgattttgctgcttttgttttcaggtactgaagttagtaattcggaacaaacaaaaatggtttctgctgctgaaccagcacctgcaaatgatgaacacacgcaaggtactcctcatcacacacactcatcctcacacatggcacggttcgtggcccagattaagagtagaacattattgctgttaatttttcgacggtcattagtaccaattgctgacatcatgcatatctttgctcttcttttcagctatagaggttggtagttcagagcaaccaacaagtatggtttcagctgtggaatcagcaccttcaaatgatgaagaacacacaacgcatgaagtgtatcttgagactgctgctgatgatatgcttacctctagtgcagcaacagatatattgcgggatacagttgagcatgcagctcgccaggccaatgcagcatgtacagatggaaccacaaggcagtctgaagcatcacaacttgatagcaaagcctctcatgatgcctcgtataaagacactactactactgtctccaccaaagatgatagcaaagcctctcgcgatgcttcttacatcttgcccagtgaaggcactgctgttgatgttactggttctaagcaagatgatgtgaacattgttggcacacaaactgctgatgcttccaggggttcttctagtcattttcaagctactttacaatcaactgagtcagattggcatccaggtcaagaggagaatttggagagtaggaaggagcaggtgaaaacggaagaagctttggataacagttctggtggcaatcaaactcacagtttgggcgatgaaccttctcatgatacatcattagcaagaaattctcctttggaatactcgaatgagcgttgttctgctcaagtaattggtgaaactttcaaaagtaaagaaaatattgttgaagtccattctgccatgaatactgatggccctgatgaagctctggatgcattgtatgtccaatctaaggaggccagcataacagatagtggtgtagctaccgatgttgataaatttgaaggtaaagagactagtgtcgaggtccgtgatgacatgaatactgatgggcctgaggatgctcaggatgctttgtccacccaatctgataaagaggccagcatggtagaatttggtgtgtctaacgatggtagtcccacagtttgcaaagcacacaatgatctcgagggtcatgtatcttgtgaagataggactggtggtgatatccataccaatgcaaattatggttctaataataaaagtgaggacaccattgttaatcctgttaaaaccacacgagaaccgttggaagaaagcaccgttattgtatcagagaattctgatttgaataagcaaagccacacattgcatactggaaatgatcctcctgcaagtaccctgttgatagttgagtctaacaaagttacttgtgatgctgaaattgtttgtgctagcagattagagtcttcttgtattgaggctgaaacagtggctatccaagagtcagctgttactgattttgagggaacaaaaggaactggggatttgggtcacaaaactggcagtccgctgtgtgatgatgttcatgatacatcatgttctgtgattggtcttgtgtgtgagaaagaacctactgaagatcttactgatggtagccattcagaagcacctaatttacttgctgctgtagtacaaactcgagaaactactgttgcaaaccaagaggaaatcatagatgcagtagtgtttattgatgcctgcaaggcagaacctgatggtgattgtactgttgctaaaggagctgaagagactgtagaaatggttcattctgttgaaaagcaatctgctgtattagaacatgttgagagacagacgaaacaaactacgatttgtggttctgtgctaaatgagtcccctcaggctgcagggttggaagaggactgctctgtactgaagcatggcggtcctactgcctcatctgagcttcttgctgtagcacccaatccaatcagtgaaacttctgttattcaagccgaaccagaggcaacaaactcggatggatactgcacaacagaggttggcagtgctttatctgaaactgtcaggggactggagccaaataaagaaactgctgttccaatgcaagaggatattgaagaagctaatgatacttctaataattgtgaagcacacaataattcggggattcatgcatttggtgaagtgttgatggaaatgcagtcatcagaggtcaaggaagtatcttttattcagtctggtgcagcaaatttgagcacacagactcctgtactgcctgatgaaacaggacaaaccaatgtggcttcgactgcagaactagtacctacaaatgatgatgaacacatgcaaggtattttttatcgcatgcataagccaccgctcttgtgaggagagcagtactccctgtgcagttattttcaatgtcaatagtaacaatggcttaaatttcttgtgtacgttctttctccctttattttcaggcactgatgttaattctgagcaacaaacaaagatggtttcacctgctgaatcagcacctggtaatgatgaacacatgcaaggtactaattttaagtatctaacccacttgtgcccacacacacccgaactacagttcttgtctcagatagaatagaacgtcctctgctgttgtttttttaaaggtcaatagtaactgcgactgacatttcttatcattctttgtcctctttctttcagacatcacggttctaagttcagaactgcaaacaaagatggtttcagctgcagagattgatgcattatgtgtccaggagactgcaattgttgatcttgggggaactagaggaacagttgatctgaatgacattagtacacaggttcctgcattacctggaagtgatgtgctaggtaatccccactccctgtcctcagcacaatgcatatattttccatcgtttaatatgcatatgggtctaggcactcatgtgcagctgtcttgttcaggtgtggaggcacataattcagaaccaaaaaaagcatcctcaccaggtctgcacactgtttaaaactcgaattagtttatattcacatatacatttacgcatgcctttgctgctgcttttctccccaggtgatgaaattattagttcagaacaacaagcagaaattgaaacgattgcagagacagaaacagtgagcgttaaggagaatgccattgctgatcatgaggaaacaggtgaccagagtggcgtaagtatacatgctcctctattagctgaatctggagaaaagggatcacatggagttgaattgtgtggtaagcacttctccccacaagctctcgtttcctatgttggtactttgatatcaagatactcatgcacatctggcatttcaggtattgagattgaggctaataattcggaacaaggaaagatggtttcaactgtggaagcagcctctacaccaggtttgtgcattatttgaatttctgaagaagttactattcaattaggattttatctaatctctgtacagacgatctagggcgtcacacacatgaagtgcatgtaactggtgatggtgctatattatctagtgcggaacaggacacattgcaagataacataagcagtggtgctgatgtggacctaacaaccagccaaaggaaaacagactctgaaggtatcaaggatccttctattgggactaacatagaggagatccaaggcccttatgaaacctcgaacaaggaccattttactgatcctcctgcgactaccctggtgatagctgaatctgataaggatacctgtgatgcagaagttgtttgtgctggcaagttagaatcttctggtgctgatgctgttggaacggttgctgtccaggaggttcctgctgttgctggcgatagagcagggagggataggnnnnnnnnnnnnnnnnnnnnnnnnnnnnnnnnnnnnnnnnnnnnnnnnnnnnnnnnnnnnnnnnnnnnnnnnnnnnnnnnnnnnnnnnnnnnnnnnnnnnnnnnnnnnnnnnnnnnnnnnnnnnnnnnnnnnnnnnnnnnnnnnnnnnnnnnnnnnnnnnnnnnnnnnnnnnnnnnnnnnnnnnnnnnnnnnnnnnnnnnnnnnnnnnnnnnnnnnnnnnnaaacatactccgctacccgatcatctgtctcagttactcactttgcatatgatttttcaggtgttgaaggtcattgttcagaacaagtaaagatggcttcggttgcagaagcagcgtctagcctggctttagtaggatattcttcttcagaagactcaatggtggatgctgctgcccgagtagctgatggtgattttgcggatagtaaaggggctggtgttgattgccaagaaactatgcctactcaagccacctctaccctcccagagaacatggattggcagaatgattctcttgcagctgctgcggtgacggttgaaccaatgtttgcttcctcatctgagcacgctgcagaatccaagccaattgatgaaacttctgttatgcaagtggaactggcaaccagtacaggggatgaatgtgcagcagagggtgacaatgttgtttcatctgaaactgttgtggaatcagagcctgttcaagaaactgttgttcctagtcaaggaggtagcatagaagctaataatacttctaccatcagcgaagtaaacaaagataccgagtctcgtgcatctggtgaagtatgcaaagatgctcagtctcatggcggtgaatcttacactgaactgcaattggcaccttcctctggtgaggaggccatgatattgtgtagtgagctgcccagccaggaggtgaaggaggctccaagcagtgaacctttggggtataatgaaaatgtgaaaacagaaaatgattcttcttctcaagaaccagtcaatgaggaatctgctcctggtgctgaaaatgcaaagattgatgaagctgacacagaacagcaactgcctcctgggcagcaggtgaaggaggctccaagcaaccctttggggaataatgaaaatgtgaaaatggaaaatgaagcttctgctcagggaccagtaaatgaggaatctgctcctcgtgctgaaaatgtaaagattgatgaagctgacacagaacaactgcctccatctggtgaggccatggtagacatatctagcgagctactcagccatgacgaaaaggtggctccaagcacagtccctttaggaaatgatgaagatgcacatatggaagaggcttctgctgcacagagagagctaagcactgaagttgctcatggtagtgaaaatgcgaaacttagtgaagctggcacgtctggtgaggccatggtagacgtatctagcgagctactcagccaagatgaaaaggtggctccaagcactggccctctaggaaatgatgaagatgcacagatggaagaggctgctgctgcacagagagagctaagcactgaagttgatcatggtagtgaaaatgtgaaacttggtgaagctggcacggagctgcagttgccaccaccttcatctggtgaggcactggtagacatatctagggagcaactcagccaagaggtgcaggaggttgcaagctctgggccctcaggaactgatgaaaatactgagatggaacggctaaacaccaaacattcacctggtggtgaaacctcaaaacttgttggagctgatccgggaatacaattgccaccgtctggtgaggctgtggtagatatatctaatgagccacccagctgccaagaggtaaaggaggccccgagcagtgacagtttgggaaatgatgaaaattcagacaccgagaagactgctgctgccttacagggacggctaaacaccgagcttgctcctagtggcgaaaatacagaatctaatgaagctgacactgggaaacaagagacacccgtgtctgctgatgctatggtagaatcatccagcgagcctcccagcgatgaggcaaaggaagctccaaccactgacctgtctggggatgatgaaaaagcaaagtcggcaagggctgctgttgttgcggaactttttggagatgcaacagaaggtggttcggatcagccattgccgtctccaagagaacaaggcaaggaagcagaggctgatggtgacttgtagagtaaattatgcaaatattgtattaagagctactagaatctgtgtaagtaagaaatgatattagtgctttagttgtaactgttggaagcttttactcagaatcaaaagcaacgtgctgagattacagcaacagtggcccacggcagtttactactgtttgatgttcctactgcgttttgttgagacagacagttgatctgtctcgtcttgcatcgaagttagctttgcgccatgttatacaaccagtcaagttcttttcgccacgacgacgtgctctggctgtaacctggaagcaccgacagagggaagaacagtgatctcctagtttcactatgttgtactgttagctgatttgaaggggcattgcagtagtgtggcttcgtaaaataatggtgcgtttgaattgtgggcatatcgatctagaatcatctgaacctaaatacaaacctggattatctgtttggatgatctgtttggtttgcatcatgagttgaacggatacattaccaacccaaccttcatagtctcccctgctcgcgtaatttattttgacggactggccgattcaaaaatcgttggacgacgcggctccgtcccatgacgaaaccaactgatttctggatggctgatttttgtatggagcggtgcc

SEQ ID NO: 5038 - DNA, 10304 bp, Sorghum bicolor
ggagcgtttggtgctcgccctctgtagagcgtcgaacgtgccgacacacacttgtcatgtgcatcgcaacactcagtttgcaccggacgctggtccagcgtccgatgctccgaggtcagcgtgagagaaaaacacttccacaacttctccaaacttgtcttcggtgcaatagaaaatatgcattatatttttataaaagcactgaatcttgtcttgcaagctcgacgagagggagagagagacccaactcctctccacctcttcaacccttgctcaaatatgctaaccaccaagtgtgccaccttgtgcacgtgtgttagcatattttcacaaatattttcaaggattaaattagcacactaggttctaaatgcatgcacatgattaataacacctagtgacactcgatggaccgtttagtcaaagaattctcctctttatagtataattatctatcctagattaataacacctagtgacactcgatagaccgcttagccaaagaatttccctctttatagtacgactatctatcctaaatatgattacatcctctatggtgtgttgaatcctcctccatataccaacctcatctaattcacatacacttagtatagaagttaatattttaggtttcatcaattattcaaaatcaaacttaaatttttcacaagaggttttccttaggaaacatcaccaatggtttcagatcttgctacactaacacacgtggcgcaaacaacattaatttatcatgctagttggactgacgtaacgcgactaacagattgagattaaaaaaatagaattattattattattattattattattattattattattattattattattattattattattattattattattattattattattattattactactactactattactattactattactattactattattattactattactattattattattattagtgctactactattgttattattttaaattaaaaatattaaaaaatataaaaaatcctcaaacacaaacacacaaaatgtttatagtcagagtcagatttcatttgtataggcattttcttataaccggctctatcagtggtaaagctaggtgtatagacatttacttaagaacggcatatacagtgaagttttagttaaaattattgtttttatatttttgagggagcgtagtaagtagtagtagtagtagtaataataataataataataataataataataataataataataataataataataataataataataataataataaataataataataaataattaaaagtatcagtgtaatttcatgtctacattaatggatcgattgtccatgggttttgctttgaccaataataaaaataaaaacgtaataataataaaataaaaagggggaaagaaaagaggaaataagaaacgaaggaattaagaggaaggagaaaacgataagaaaatctggagcacccaccgaacattttttttccttcttctccccgatcaccttttcccctactctataactacctccattcccggactcgcacaagcttcctccttcccacatgggcactgccccctccttccccaactcaacttccaagctccattcgccctcctcgtccttcgccacctccaacctagttccatctctgctggattggagagctttgaagcatgtttccttctcgcgcgcgacgtgctcgacggaattcctcgtctgcacaggagccaagaaacgctaggattaggcgcctcccggggtcccttttagttcccctctaacgaatcgtaggtttgcggtttggtttggctgtgtcccgtgatttttgggtggctttggtgtagagtttagaaagatatcaagaacttccaacttggggtttcctgtagccttttttagctgttctggggcttttatgggagtgcccgtcgcgcagaagtccgattcttgggtgactgtgcttgcgatgacggacaacggcggccttggcgttcggcctattaacggaggccgagggggtgccgtggagcagcgcgggctcggcgacaacgggcctccagtgtccccaccagagcgtgtttgtacgccgcctgcgccgaggctggctgcttggcggcgcatgtcgtcgcctggtcctctccggtgctcaaccccaaggtgagcaattgactttcttgtttggcttagaggggataacttgttgatagacttttcactgaatgaaataagtggatgcaggagcattgggtgtgaagatggtgaggatatggatcggtacttttccccacagagtgagttttctcaagacacttctgatacggattcaatgagcacaagtattagtaggatgtataccttccggttggggacttcgagcccattagatagtcctctcaaacaattgggagtaggagacatgagtcctccctcaaggaggggttgccattctcctagctatccttggaattcttgccggggatcagatgatgttgattctagttttatgagttcacctcagcatcatgatgaacagaggaaagatgatgtgcaaccaattgatttggagagtagacacatctggtatcctccaccacctcaggatgaaaatggtacttttcaatatgatgaggacgatgacaatgatgtttgtgttgggaaggtctttggacatgttcaccatgattattgcgacggcgatgatgatgttgatgataatgatgattatgattcgttagggatcaaagggaaacatagtatatctcacaaagagttcttgaggagtgctttacatgggcatttcagggctctcgtgtcccaattgctcctaggacatggcattgatcctgtggatggctggccagacatagtggcctcattagcttggcaagcagctacctttgtcaggccagacacgagcaagggtggtagcatggatcccacagactatgtcaaagtcaaatgcgtagcatcaggaaatccaaatgataggtatgccctttggctacaacttgtactgaagaattacatgaaataatgattgttcaactgtttgcagtgctttcattaaaggtgttgtctgttctaagaatgtaaaacataaacgcatggtgtcaaaacatgagaaccctaggttgcttcttttgggaggagcactggaataccagaaagtcacgaacaaactagcttcaataaacagcattcttgaacaggtcatatcatcattttccagttacatgttcatgctgatttatctcaatatgttcttaatattgatttcaaatgcaatgcgtacaggagaaggagtatcttaagaatgctgttgcaaagatagaggctcaacgcccacatgtcttgctagtcgagaaaagtgtgccattgcatgcacaacagcttcttgcaaaagatatctctttagtattgaacgtcaagagatcacttctggaaagaatatctcgctgcacaggtgctcaaattgcatcttctgttgaaaatatcacttctacaggagtcggacaatgccaaacattctggattgagaaagttacagaatgttcatcaccaaaggtctcaaacaaaaaaacggtcaagacactgatgttttttgatggttgtccaagacgcttggggtgcacggtaataatcaaattatctaattgcatttccaagacaaagatagcttttatggcccaaatagtttaaattcttctgccatttgtcttttctgtccattattttacacctgaaggtattatgtgcaattgttcattgcaatggattttctttggtgaatagcaaatgctttgtttcaatagtcgattaatcatttactatatttggaacttactattttgggtctctttctttatattgtgattagccatatctgaaaaatggcatgcatttacaccttcaacgatatgattttatttggttgatcgaaaattgaaggcctttctttatattgtgattatgtcacataggataaaagttatgcctttatttatactatgatcatgtcatatctgataaaaatggcatgcttttcctaggttcttctaagaggaaagtcatatgaagagttaaagaaagtcaaacttgctgtgcagtatgctttatttgcagcataccacctgtcacttgagacctcatatcttgctgatgagggtgcaacacttccaaaagtcccctcagatcttcaatttgagaagcagaattcttcctcaagatactatcagcagaatttgaatgaatttcaaaccattgaaggggaaacttttggaagtgggtgcatcatgccttgccttaatggttctacaaatcaatctcattcaagagatgacataattcacgaggaacatgcacactgtcattcaagagccgacttaagtcaagaagaatatactcgtggaaccattaaggtatacccttattccacagaagcttcaatgtatggcaactgtataccacctgttcagacacctaaaaattcacttgccagtgtgagaaaaaggacaccaggaaatttatattttccccataatggtcacatagatgaagcaggtggtggaatgtcaaaggttgatagtgacttccttgacttggataatggttggaatcatatctcagatgaagattctgtagcaatacgtgatcacaatgggaaccacaacgaatattttccaacatctgacagtccacagagcattttggtttccttgtcagttgcatgccctctgagaggaattgtatgcaagcaatctcagctatttcgaataaagttctacggtacttttgataagccacttggaaggtattttcgtgaagatttatttgttcaggtagttgcgttgtcacccataatctgctagtatactattataggctttacagtaccttattaattttcatccaccctatattttcagacttcatgctgcgaatcttgcaaggagcctgcagaatctcatgtgcgatgttacactcatcaacaaggcagtctcacaatcagtgtcagaactcttccatctgtcaagctacctggggagcttgatgggaaggtatggatgtggcacaggtgtctcaggtgcaaaccaaaagatggaattcccccagccacacaaaggatagtcatgtcggatgcagcacgcggattatcttttgggaagtttctggaacttagcttttcaaatcacacaacagccaatcgaattgcctgctgtggacactccctccagagggactgccttcgtttttatgggtttgtagcttcttattgtatactcttcagtttcttatctaataataaccaacataacagttcgcattctcaatcaaacaggcttgggagcatggttgctgtcttccgttattcaccagtagacattctttctgtcaacttgccatcctcagtactggactttgcttatccaaaagctcaagattgggttatcaaagaagctgttgatgtatgtttgtgttagttttatctaagcttgtctaaattggttctagaagccaacccattggcatcattttgggagatgtattgcccttgctaagcttttatgacttaacttgcaggtatgcgctaggaaggaacatctgtataaggaaattgttgttaaacttgactgcatcgaaaagatagttaaagaccagaacattggtatgaagtcaggcttgcataaacatgttgccgatcttaaagagttggttaaagttgagtggaagaagtatgacgtaagttcaaatgctacttgttttatagattgctgttgaactgtacaaagttttctatttgtcttgtagattgctatcgaaaagatagttaaagaccagaacattgctctttactttttcaggtcgtatcagggttttctatcatagatgacttgcagacatttgaaccatatatagatgttctagagctcaatcgcctgaggagagagcttgtacttgatattcacgtatgggatcgcagactgtacatgatgcactccctcacaaaagaaaactgtcgtactgtgccaaatgatgcagaatgttctgagaagcttactgaaagcttattagaacagtcaaaggatgtgacatctggtaaacatttgaatgttgagaattctctagaacagaatcaaccaagtatgttggaagtggctgcagtttcagtgaaatcatcatcccctatgatggaacaaaccaacacttgtgtttcacgtttggaaaccaacattatgggtgatctatccatgcattctggctcaactgttatcagctttgccccaggcccatgtgaaatgcagagtgaaggagtgctggctgaactagaagctggaaaatttttgcagaaatcacaatcttctgcctccaatctttctgacagaattgacttagcatggactggttctggtcagtttgttaaggattcatcaagtagcgtggaggcagtttcatttgtacctgctagtctgaaggatgatcctgcataccagaaggttatagcaccaattagaatcaaatcattcgattctgctgtcagttccagaaatgttgatgattcaaatgctagtataagaagatcttattctcaaaggcccccaaaagctattgagagaactggtaagggcctgtcaccaacattcttgaacaagctgtcactttctggtatgattgatggcgagagtcggttgctactgtcacaaaatgattcaaatgttattgttccaatttatgatgatgaaccatctagcatgatagcccatgccatgactatcccagaataccgcagcttcttgttgccacttctggatcagaataatgaatctagtttattgaattatggttctgatcagcctcaacctacaactggaaatgactctaaggataaccatttaactgtttcttttgaggatgaagactcatattctgttgataaagcaaaattttctgtgacatgttattttgcaaagcagtttgatgcaatcaggagaaagtgctgtccagatgagctagactatatccgctccttaagtcgctgcaagagatggagtgctcaaggtggcaagagtaatgtctactttgccaaaacactggatgacagatttgtgataaagcaagtgacccggacagaattagattcatttgaggattatgctgttgattacttcaaatatttgacagactctgtatcgtctgggagcccaacttgcctcactaaagtccttggtctttaccaggttcgtgttactactactttgttactggtgttgtgtttatcaaatcctgtgagattgcataatgaacatagctgtgcatttatgcactagatcactgccaagaatttgagagatggaaaggagctgaagatggatgtaatggtcatggaaaacctatttttcaagaggaaggtatcaagaatatatgacctaaagggctctttgcgttcgcgctacaaccctgatacttcagggaacaacaaggttctcttggatcttaatctgttagagacacttcacacaaagcccatttttcttggaagcaaagcaaaaagaaggctggaacgagctgtctggaatgatacttcttttctggcagtaagtagactcacttgctgtgagatcttatttcattggtgaaggtttatataccatatactccctgggtgcagcaacctagtatttcaatctggactgtgaccttggttgcatagctaattttacattgtcgccccatctgacctcgtctgtatatgaggtgtcactaccaaaaaaaaactgtttcatgcactcatttccacttcatcatgattggtactatgaagtagtaatctttttatgtcatatgacatgaaaagtatgccagtacatctggtggtacatcggatttcagtatgaaccttaaccttgaccctggtgatgtacaccattgctgggttcgctgtttgattagcctgatctgcacatacttttctccatcctgagtgatgtgtttcagctcccctccctttctccctcctcatcactcagtaacagaccagacccaatgatcccaacaaaaaaatttccttcttttggtgtaacctataatatgtgcccagacatctgagtttcggacaatcgcacacattagaagagccacctaccttcccccaccattttcaagattccaagaaatcctaagcagccagctgatatgggaaatattgaatgcccaatattagacatgccaattgaggctttgcccattgaatgttatgattcatatttccttctacaaagatagaaatagacagcttttgccacacatctgatattcagttgtgaaaacatgtagaagccacaatctttcattttggagtttttgaggcgcatagagcaaatagcacataaatcaaaatcacacatacacaaacacaaacccatacacacaagaggcaaacctttgttcagttctttcatgacatcgcggagagatgtcgaagtagcactacaaaagtgagtaagaggggaggatctatccattttttttggaggcacaagcctggccgccaattgaggtaaggttgcacacgtgtagagctaaggttgcacaagtgtaggggtcagagagtggtatggagggagagatagcagaaagtagtctctagccagggtatagcgtggcagctaacagagaggagtttcaggagaaggaaatgcaaagaaatcaaaagatggccaaggtccgcacgaaaagtgcataatatataaatagtggcaaatgctgtttatttatcatctttacggtggcaatttatgaactgtaattggtagctaggatgggtgtggggcaggccaggcaaacaacaagctgtggggttgctgggttgaggtagcttgaatgcactggtatttgaaaaatacactgttgccagatgagtgattttggtgccagtgtagcaagacttggtggttagtccacatggctactgtcgatggttcagataggtcttattcatgccggctacttggatatggtgattcgattcccggctctttttgttgttgccattctaattgacaacttgtatctaacctatcttgtcagtatggttcagctttatatagatggtgactatttgagtaaactggtcagatcaacagactttttagcatattcatttagaataccaaggtgcatgaagatgcggctgttgtcactatcactatctaacttttgctgccatccattccccttttcctcagtcggtggatgtgatggactactctctcctagtcggcattgatgaggaaagaaaagagcttgtgatggggattatcgactatcttcggcaatacacttgggacaaacaactagagacttgggtgaaggcgacaggatttctaggtggctccaaggatgttctgccaaccatcatatctccggatcagtacaagaagaggttcaggaaggccatgtcgaagtacttcttggctctccctgaccaatggtcaccgtaatgcctcctccaatgcatccaggccattcaagcgcgacggggaagacactttggttttcctttttcttttttccctcctgtatcttttagaacaatcgatccatctatgcctcttgtatgctgtttttgttcacaacaggcaggatgaactctgtggaggattgtggcgattgttgtccatccaggcagaggttaggcgtcaatacgtgtacataccctacactataaaatgaaatgcaaaggaaatgaaaatacgggaaccgagttccttaccagtgatatgttttgagattttgtggaccggaagttgtgtccattggtgcttctgagatctgaagtatgcaactactctcttcctgttccaaattataagaccttttaacttttctagctttttttagatacattgcttttattgtgtgtctacatagcgtatattcaaatgaatagcaaaagttatgtatctcgaaaagttaaaatgttttataatttaaaatggggatagtatttccgttttcaataacagagagtcaaaacatcttatagtttgaaattgagagggcatttccgtttccaacaactgtgcaagttcttcgttttattgttatgaacggaattgcaccttttttatgcgacagaatttagaacgatgtaggtctgttcctaacctacatccatcttgtttagcgatattatagttcaatcttactggaatcagtaaatgcttcgctaactggattctaaaacgtgaaataggacaactgacagtgcatg

SEQ ID NO: 5039 - DNA, 4593 bp, Sorghum bicolor
  misc_feature (3129)..(3228): n is a, c, g, or t
gtaaatataggatctatattggtggcgattttaaaacagcagacaatgaagagtcaatttggggatttacattggtggccatttaagacaacaaacagtgcagagtcaatttacactaagggcctgtttagatttgaatttttttggctcaaagagaaaaaaatttgtggaataggggcttgggaactaaacagggccaaaaaatttgggggtaaaaattttgggctgcaactgtgcacgcactctcatagaagcccaccaataacaactgcaaatgcatgcagcccaagttgtatcagaaaaaaatttgccaaactaaacacctaaaatttttcgcatgttctaacgacaaaattttttaccactttagccaaaaaatttcaaatctaaacagggcctaacggtagagttaagtcaactaccaatgtaaatcatatatttacaccagcggttttttaagaataccgctagtgcagctatatctacggtgacggttcataaccatgggtccacacatctgtttttactttgtggctactctttattaaccgcatgtgtggaaaaaaacctacgcttcaacaaataccgtattgtggtctaaactatattgcttcatatgccaaatgtgtttaaccaagtcttgtgcacaatttttagcatggtgactatccttacacacagcactgcagaaaactacgccctcaggcctcagctattgatattcctctttggagaagtcatgtcacctttacttggagatttgaggatcaatattcctccctactggtagttctatttatagttttatacagtcaaaagcacaattttccacctttcaaaaccatctttattccatttgcacgagtgcgtatatctacagcagctccctaaaaggtggtgacggccggtgagctgccaggactaagcaactgcagcgtgggtcccaccggtcaggaattctgacagatggtgactagtaaagtaaattgcatctgcaggtaagggaggagttgtgagatgctattttcggctttcatataaggcattacgcgtctttctagaattattggtcactgtttgttctaaagggagacacatgtccttgtttctcaagtctgcagtctgatcactgatgtggatatacacggaggtggcgtaagagccccgtacgtagcagtgtagcacaaacacaatctggctagccctgctcaactactacttgtttttgttcatgggaagcttatctgacattggaacataagattttacagtatactgggaagcttatctgacattgtagaagtagcacaagtaaggccttgtttagatgcaaaaaattttagaattttgataccgtagcattttcgtttttatttgacaaagattgtctaattatggagtaactaggcttaaaagattcgtctcataatttataggtaaactgtgcaattagttattctttttatctatatttaatacttcatgcatgtgccgcaagattcgatgtgacggggaatcttgtaaagttttgggttttttgtgtatctaaacaaggcctaaagtgtaagcactcaagcagcataatccatgatctgcattcgacacctggttctggacatataaaaataaaataaaataatctccagcagtgaacacctggaaacatccaaatgatatgtagtgcatgcatgcatgcaaggaagaattaatagtcgtttgatgcatctcagacagatgcatcatgctctgaagagattttccacgattggtgaacccataaccaccaaacaacgcgcgctagtgcaaggtttgacccatccatagcaagcttttgctgtgaacacaaacactgatcctttcagcttgcttactccaccaaccacatgagagtttgttcatctccctcttgacccacctgtttctgtgcaccccacgtatcctcgtctcactttgctatcgctatatatatataaagcacatgcagagcttgcaacagaaacatcagctagctagctctgctgcctaggaaaaggaacacagcttgaggacgatgatggccacaggcgtgttgtgctgcttcagggcatcatcatcgttggccctctgcattgttttttcatgtctcctcctggccggcgtgccctcctcgcttgtggtggcgcaggacccgtcgaagctgagcctggagcactactccaagacctgccccaacgtggagcacgtcgtccggacggagatggagtgcgcggtgcgtgctgacacgcgcaacgccgcgctcatgcttcgcctccatttccatgactgcttcgtgcaggtcagtacgtcctcagtcagttctgtttgtttttcttgcatggttcacttcacacactgaccaaaaccttcagctatgtgcaccgtgcaaagcttgtatcagtatcagcccgatcgatgcagcttttattctaatttgtgcagccgctgaacatctgaattgcaattctgaacgatgctacgatcgatcgtcattgcagggctgcgacggatcagtgctgctcgacgacacggcaaccttgatcggagagaagcaggcagagcagaacgtcaactcgctgaaaggtttcgagctggtcgacaagatcaaggagaagctggaagctgagtgccctggaaccgtttcctgcgcagacctgctggcgattgcagctagggacgccgttgtgctggtaaaccaaaccaaaccagaccacatctatctgcacacgccctgcagtactgtttttctcttctgtgcgacgcatggcattggctagcttattttttggtcagagcaatttcacacacatgcactaggcgactgcattagctagcttgttttactgtatccatcatgcatatatatgttattattacacatacagaactgacgaccgaaaccatgtcttgcaggttggtgggccttactgggatgtcccagtaggaaggttggactccaagaaggcgagccttgacctagcaaacaatgacatcccgactgctcagcaaggcctcctcacgctcattgccaagttctgggagaagggccttgatgccactgacatggtggccctcgtcggtatgctgctgctccatatatatatctatatatannnnnnnnnnnnnnnnnnnnnnnnnnnnnnnnnnnnnnnnnnnnnnnnnnnnnnnnnnnnnnnnnnnnnnnnnnnnnnnnnnnnnnnnnnnnnnnnnnnncacacacaaacatatccagaggtctgaacaaggccttctcactctctgtgtctttatgtgtgaatagacccatatccacactcatatatgatacatatatatatatatatatatatatatatatatatatatatatatatatacacacacacacgattccaatcttatataaaataaatgtgtaccacgtgcatatatatatatgtgtaggatcccacacgatcggattcgccaggtgcgcgaatttcagggacagagtgtacggcgacttcgagatgacgtccaagtacaacccgtcgtcggaggcgtacctgagcaagctcaaggaggtgtgcccgcgggacgacggcgacgacaacatcagcggcatggacagccacacctcggcggtgttcgacaacgcatacttcgagacgctcatcaagggcgagggcctcctcaactccgaccaggagatgtggtccagcatcgccggctactccacctccgacaccgtcaacaagtactgggccgacccggaggctttcttcaagcagttctccgattccatggtgaagatgggcaacatcacaaaccccgccggcggcgaggtcaggaagacctgcagatttgtcaacacataggattataataatatatatataggatgctcaagactgcagcaggagaaagagaaacccggccggtgcttgtggttgtacttgtacacacctgccccttcttttgatggttgatttatggtggtttggaaaataaataaccctttgctgagaggctattgtattatactatatagcatattatatgttatatacattgtggcactgtaaactatggttggctgctatgtgaagatacgtacacatcttggtccgtatatgtctgaattcacacgtgatttggtgtactcgctggtctttaactccattctttggtggaataattcaacttaattttgatggcggagcatgtgagaaaagattctctgagtcattttggtggagactgaataaggagcagtgaggagcattttttttttttgcatctaatcttctatcctactaattcaacaaccttttctttcttagatccacataaaaaaaaagtcccctactgagaagcctcttatccattgacctagcaaagtgtatttagaaaaacaacacctttaaaacaaactgtctagatttattctaatcattctctctccttattcacttaaatcaaacagtcaatatagtttgtgtcaacctcattgtccatcccccgcccacacccgcagccaatgttgcttgcttcaccacaacgacctgagtccgaccccctcctcattttcattagttgattttaaaaattaaaataata

SEQ ID NO: 5040 - DNA, 3300 bp, Sorghum bicolor
ggtgtgtcgcccaaaagagcttggaggtttgggcattttggatttgcagtattttggatgggccctcagggtccgttggttgtggttggggaaaactgaacccaataagccttgggctgtcttccctatcttaataaataaaaacgtccaagccctcttttcttgaccaccactgttggcagcgggtctcagaccaagttctggacggacaggtggctcaatgggaagtctatcgagctgctggcccccatctttttgcttgtgttcccaaaaggcgtgcaaaaaatcgtatggtcgatgatgcgcttcgggacaacacttgggttcatgatatccaagggcaccacactgttgcagttctggctgaatatttggaaatttgggagatggttcaggaagtggttctgcaacctgaagtgactgataagcacaagtggaaatttgaagcttctggagatttttctactaaatcagtgtatatggccttcttccatggtgctatcttgttcgaaccctacaggctgatttggggcagctgggcccccaggaagtgtaaattcttcctttggctagtggttcataacagatgttggacagcagataggctggccagacagggtctcccacatcctgagcattgccctctttatgatcaggggacgaatctatccagcatctcttatgttcctgcgttttttcgcgacagttttggcacctgctgctccgtcgttttggacttcctgacataggtcctcaactagactcgacaaatttctttgattggtggcttcaggccggcagctctttcaacaagaaagttaacaaggaagttaaacaaggcttcaactcgctggtttctttgggtgcttggattctttggaaaggaaggaacgccagggttttcaatggcatctcgcgcaatctgagtcgtgcccttctccttgcaagtgaggcggttgatctctggattttggccggtgccaaaggcctcagaagacttagaagtctggttgctgtttgcaatggtggttagaggcattttgtagtgttttttggtcgtctttctttgtctagggctttttctggagtggttgtttttgtagggtggtttttgtgttttagtgttcctttgcgtgtgttggtgtgagtatggggtgatgttgaacctgttttgtacttcggcatttatgtctccttttttctctcctatcttaatgcaatgatacacagctctcctgcgtattccagaaaaatagaatatattgccctcgttatgtcctcttgaggctcttttagatttattttttggcttattgaaaccaaaatccaaaatgaagaatgacaaccattaccttattgagaccaaaatctaaaatggagaatgacaaccattgacttatgttattaaaatttttacatggtgtttagttttattatacaaaatgataaattaaaatctagaattctttgaaataaaaggggaactaaacaccccctctgtaaattgtccgctgcttggcgtgcttactaacctcgggtgtcctacagcgttcacgcaacaaaacgttacaacaactaaagctcgtctgcttagaaggaaactaaatatctggtccggttccggcttcggcagggccaccaatccaccacggttgctaatgccatatctagatgcgaaaagtttttagattttgacaccatagcactttcatttttatttaaaaaaacattgttcaatcatagagtaattagatttaaaagattcgtctcgtgatttacaaataaactatgcaattagtttttatttatatttatatttaatgttctatgcatgtgcatgtgccgcaagatttcgatgagacagagaatcttaaaaaagtttttagtttttaggtaaactaaacaagcccagagctagcccacacgatcagaggtctatcagaacttggagaggcttatcatgaagaaacagccaccaagcagtcgagagactgcacaagatgaaccagctctctcttctccaccgcgccctccacctacatcgcctccctcccggacgcggccatggcctcaccgccaccgccgtcgtccgagctcggctctcctcctctgaacccaccccacatcagcacgcaaagcgccacctcgccgtagcacgtcctcacgagagcatcgcggcagctacggatcaggagagccaccaccacccgcgtcaagagctcgcggcgggcggcggcggcggcaggaccaggacgtgcgcgctgccgacgtgggcgctcatcggcggcatcacggcgggcgtggccgtggcgctggcgctgtctgcggggccgggggccggccccgccctggcgctggggccgccggagggccccctggtggaggagttctgggacaacatgcggcggtacgcgctgtacgtggtgacggtgagcaccggggtggcgtacgcggtgctgcagcccatcgtggagctgctcaagaaccccgtcaccgcgctgctcatcgtcgccgtcctcgccggcagcggcttcctcgtctcgcaggtgctcaatgccatggtcggcaactccgacttcatctacaggtacgagtagggtaggcgagtgtgtgtggcgctgaggcctctcctccctgtgcccgagaatggagatagagatgaaacgtgtgacgtgtcagcgaatcattcgacggtgtaataagtgtgtaatctattcggttcttcttcgagttcggcttccttttccagctagaacaggaacgtggttgaaattgaagtgtgttgcatcgttatggaggtcttgtttagaccttgtttagtacactaaaaaaactaaaaacattttcagattatgtcacatcaaatcttacgccatgtgcatagagcattaaatatagatgaaaacaaaaactaattatacagtttgcctgtaaaatcacgagacgaatcttttaaaagactagttacaagttactccatgattggataatatttgtcaaataaaaacaaaatgctacagtattaaaattcaaaaactttttagatgtaaacaaggccttatttataaatctagctaatcaataagataaagcactccaacaaactcttattgattccactagatgtcataatccaatcgtgatcagtgcattttcattagcaacataagcatcatcggtaacttatattcagctcaaaactgcacttttctgggcactgctatgttcccgcggacagtccaatgcatacccaaatagtccatgaaagtgcggttatagagttaacaatttgtacagaca

SEQ ID NO: 5041 - DNA, 5955 bp, Sorghum bicolor
tatggcctatgcaatgcaggcggtcagtagaattttcatgatgccctgcgccagcaggcaacccctagaaccgagaatatacagtactacaagataccaacagcagcatgtgaccaatacaaatacagcgccacttgggtccctgctcccagcaccagccagccaaccttgtttagttctaatttttttacaaaatatacactattgcatttttatttatatttaataaatattgtctaatcataaattaactagactcaaaagattcgtctcataaattatatgtaaactgtataattagagtccgttcatttatcttatcagctgtatttttttactatgataaatcaacgaacaatattttcagctataactttttagcttagcagactcttagttatttgttttatatatttaatgtttcgtatatttaccgtaagattcgatttaacaagaatctaaatttttttacaaaatttcatttagaactacgcaagacctaggatcgatcgggtaaccttgtttagttctaaattttttttgcaaaatatgaattgtagtattttcgtttgtatttgataaatattgtccaatcataaactaactaggctcaaaagatttgtctcctcaattccgaccaaactgtgtaattagtttttattttcgtctatatttaatactctatgcatgcgtctaaaaatttgatgtgacgaggaatctgaaaatttttgtaattttttttaaactagttggcaaaaattttgggttttgggcaccgtagcactttcgtttgtttgtggcaaatattgtcaaattatagactaattagagtcaaaagattcatctcgtgatttacagataaactgtgtaattagttttggttttcgtctaaatttaatactccatgcatgtgccgcaagatttgatgtgacgggcaatcttaaaattaatacccccagggcaagacccaagtggagtggggctgccccgtgtccgtgtcgtctcgccggttaaaaaaatgccgcgccggccgccggcagccaccgtcgtcgtcacgggtggcagcgtcccacatcccactcctccatctccattcgtactactgtcatgtggcgcccatactgcacctccccactccccaactacccccgccggccaatcccagccgtccaccccccccacggctttccacgccccgtcaatccccggccctccacgtcccctcgtgtgcaccgccgccggtgccgcccgccgattacccccctcctcctcctcctccgctccacggacacaccctcagcgcgggcgcgcattaacaccgctacgcgcacacacgcacacgcacacgcaccaccacggaccgaggcattcgcattcgcaaggcaccgacgcccaaaaataactaggcgtccccacaaatcgctccaccttccttccttccctccctccctctctctctctctctctcccctcctcctcgctccgctgcgcttgagctgtcctggcctggccccgagatccacgccgcatcctctccgtctccggcgccctacactcgcctccggcggcccacacgctgcgtcctcctcgtgacctccggctgcggccgaccgccggttttgcttccttcccggtcgtccagggagcggagagcacactgggcacggcaggaggagaggcacgaggaggtgggattcgattcccaagaggcgcggtacggtactagcctgagcgagagggcagccggccggctggctggctgggcgccggtgacggacgtgctcggccttcctgcgagctcgccaagttggcaggccgggtgctgttgttggagcgcgtggagcaagccaagcgggaggaggccttgctcgtagctgcattgggcggtgatatctccgaggaggcagccgatttcatcccgggaggagcctcccagccctcggacgctcccggcgccctataggtgcctctcgctccgcttccgctttggtccatggtccatggggtggaaggtggcgtcagggggtaaggcggcggccccggcggcgcccggcggcgacaagctcaggttccctccctcctcctccgccgccgccgcgcggtcgcggatgaagctctggctcgtgcgcgccaccaccacggtgctgctctggacctgcgtcgtgcagctcaccgccgtcggggatacctggggcccaagggtgctcaagggctggccatcctgcctcacgccgcacgacgaggaggcggccgccgccgccgcgcgcccgcggcatcctctcgtcgtcgacagggccgccgcgctgccgctgccgcccaaaagtgagttcgcctgctcatcatcgttatcatttctcgggttgcttgctcgctttcctttgtcctgttccgacctgctgtctgcgctctggacaatcacgatgcggttcccagctggacattgacagcccgcctgcattgcatcgtgccgtgctagatccctccaaagctcccgcgtacatttccgggtctcgcatgaaagtgacctgtgattggtgaagatttcggtcgttttcgtgtgctccgattggcaaagcccgtcacgagaatttcgttcattctgtgctaatgtcacctgtatgtatgtatgtttgtggtgctttccgcagcatttgataatgcaatcatgctcacatcattttttggatcagtatatgtaattggtataaatattcacgtcaggtcatgcatgccgttcacattgcattgcattatattcttttggtcggtagcacaacagttttgccgttctggaccttctggctattgtattctcaccatgatatttgcgtttctctgtattttcatgcatactgtttaggtggggccacattttcataggcttctcagcagctcttgggtagctgcatcattggcctttttctagtaaccctagttgcatttggtgaaacaacacttgattttgtcaattaggaggtaacttagctcttagaacacatttcagctcagacagaggactataggagccaagctaattgcacctgtcaacaaagaccttgtttgtttccattaactgaatgtctttcctaataaatgactgcaaaagtgtggtcataattttcttgttgctattcaaatactcaatgtgcaccagcatcatagctatagatccaattagtaaaatatgttgtgcatgttctagtgtttccttttgctgatgcttcgttgccaatgccttccaggaatatataggaacaatggttacttgatggtgtcttgcaacggtgggcttaaccaaatgagagctgcagtaagcaatcgggaaacccttatttgtattgatttggcagtttcttttacaatgtctggctcttaacactggcttctggccttgcctacttttttatcagatatgtgatatggttgtaattgcaagatatttgaatgtaactttagttgtgccagagttggataagacttcattttggaatgatccaaggtgctgtttggcgacttcaaattgccttttaatctattattaagacttgtgttcatgtcagggaagctaacttcagcagtccattttatcctgcagtgagttccaagatatatttgatgtcgagcactttataacctcattacgaggtgaagttcgcattctgagagaattacccccaagggtaaagagaagagttgaacttggaatgttccattccatgccaccaattagttggtctgatatctcctactatcaaaatcaggtaagcagcatcatattttatctaagactagtctacattgcagaatttattgtataaactgacacttggttaattttgaatcagattcttcctttgattcgtaagtacaaggttctccatctgaatcgaactgatgccaggctagcaaacaatggtttaccaatggagattcagaaactgcgatgccgagtaaattatgcctctctcagatttaccccacaaattgaagagttgggcaagcgagtaattagaattcttcgccaaaatggacctttcttggtgcttcatttacgttatgaaatggatatgctggccttttctggctgtactcaaggttgcagtacggaagaggcagaagaactcacaagaatgaggtgaagttttggaatcgtacctttaacatgaagtgaaatttcgtctatttcttatctgtagttgttctgttgactggacacgctccaaactactcttggcttcaggtatgcttatccatggtggaaagaaaaagtgattgactcagacttgaaaagaaaagatggcctttgcccattgacacctgaggagactgctcttgtcctcagagcacttgacatcgatagaagtatgcaaatatacattgctgctggggaaatatacggtggaaagcgcaggatggctgctctaacttcagcttacccgaatgtggtgtgtgaacaaatatattatgcatctattgtatcgtagttgttatacagtagtcgatctctcctttctcattgctgatgtcttgctacaactattttctgtaggtgaggaaggagacacttttggagccttctgatctgatgttcttccagaaccattcgtcacaaatggcagcactggattacttagtatctttagaaagtgatatatttgttccaacatatgatggcaatatggctaaagttgttgagggtcaccggaggtttgcactattccactttgtcatacagtttataagcatatcagcatatgcagtttcgacataccaggcagcatgctaatcgtatttcataattgtttattctgagtgttgcattaatgatgtcccaaaaaacatgaactgttaatgttttaaatcacattgatgatcttgtcttcaaccaccatcaattcctcactactcacagtgatgcttcaaaatttgtgcaattgagttttgagacagcatagaaacagtagaacttaatatttccctattttctgaagctgaaatctggaaatatgttcatggaagtttattattagtgactatatattagatatcttatattttgcaatttctaagtagcatgttaattactggtaattccgcactgttagctataggtatatttcatactttcatcatgctttctactatatgctgcaaaggtgtgcagtttatcgtctgtagtaattacttgtatctttcattttctgtttctagattcatgggttacaagaagacagtcttgttagaccgaaaactcattgttgagctagtggaccggtacacaaatggttctctgcgatgggatgagttctctgcattgatcaaggttgcgcacgcaaagcggatgggatcagcttcaaagaggatggtgattcctgacagacccaaggaagaggactatttctatgccaatccccaagaatgcctccaggatcgtgattttttgcaaacctcataatatcctttcatgtctatataccatattcacattataccattctttcacaaacacaactgaacccaaaagcaaatactttggagccagaaaggcgactcggcttctgtcgagtcatagatgaggccaatctgtaaacttgagggagggagggagaaaaggggggttggatgtagttggtaaatacacattatagaatggagggggggatttgttaattcccaaataagaaaagtgatggacttgtatagatgatggtgatagaattaccgctaagaagaatgtaacttaagagagaactgagatgcagctgggttcctgcatccggtcttgcgttgtgtaacatagcagttgttcttgatagccgcctccattgtccccaccggcgaaattttggcaatcatgttgaaagatgtatacactttttattgtatcgatacaacctgtattatatatgtaaattgtgcagaatgtttctaccacttacagtttttataatgtga

SEQ ID NO: 5042 - DNA, 5955 bp, Sorghum bicolor; identical to SEQ ID NO: 5041

SEQ ID NO: 5043 - DNA, 3174 bp, Sorghum bicolor
agattgcatgaaagtgttaatcatgggagtgaagttttgatactacactggaaatttgtattaagatttagtatgcattatgattggagtactaattttctcttgcaatgttattatggatgctgaaatggaaatatttgcacaaagaaaactggttagatgctttgcactaaatattgactattccaaactaatagctatgcatcaaaacattgacccagagtgaaattgacaagattgaggtcgacaagatagagcaggaaaggatgatgtatgctgaagctctcgcggcagcgagagagaaccctgacgaggagcacctgaatatagctgcggaggcaaggtcaaggctgcaggtccttgtactatagtggccccttctgattgtagcatatgtatgataatgttgaactgctgatgtaattgtaagtgttggcttgagttgaggtgcttgtggaagaatcgttccggtggtaatggagtgagcactgtaaactgacagctatttcgtgttgtaatcatatttattcagtcctgaagcctgtattgtttaccaggaaacttgagctagtttagatttctgtgacagttatcatttcaagatttaaacccatggttgaagctgcttatgtaaattgttcttcagcctaaggtatagacaatagcttttgaggagtgtacaatgggcctgtttgctatagtttttaagctacttatggctaaagcaagctgaaattagatctctatgtttttttctttgcagttttttctagccacatttctcacaactttcatttagaaacgtagaaatcgggtcagactagcttagtcttccatttatactaaaaacaacatagaaactggatctgagcaacttatcttaatttctctctctgtacattttagcaactctaccagatattatatccaatcccttataccttaaaaaataaataatctagaacatggagtcgctgcagttgatctcctgttcctataattctgaagatattctctaaaaccgttttaaaaacaaataatttagaacatgggagtcgctgcagttttagctggtatacagcagttcttgcttataacataaaccgttttcaagatattctctaaaacaatgtaagcaatataagaaatccattgaagatgctcttattagggaaacacttctcttcatagccgagaaaaggatgctaaatctttttttttttttggaaaaaaaggatgcccaatctggctgcatctgagccactgctgttttgtgtgagtcgtgattcgtgaacaatgaagtcctggtacatctctggtcctaactgaagcttccacagtcctcgctcttggagccgctgatccagaccgagatcgacctgtggtgttccgctaggttcagtcagttgcgggtgattatggctttcattgtgtagccgaactctgtcggcttttgttttcagagtcgtgttgttgttgtttttttggttgcttcaagctaccggcttttgtaacaaaacctattcttgttaatgaaacacgtgcttaaacataatctcaaaaaagaaaaaaaattgcaccgtccaaacgaaggaccgagctccaaggcccaccaattctcaggtcgaacatgatgacccaggcccatcccatccgctcctcaatgatccatgtccatatatgattcatctgccctagaactctagaagtctagaacaacagaaacaatcaccaaccagcaaccataataaccggacagacactacagaccccacaaagccatcgtcaaccgtttgaaaaacatggcgcgcaacggccgggcggccatcagctttgcgtctcccacctcaagttttcacgagagttcctcccatcctcacaagcttaccaacacgacacctataaaaattcctcgccgtctccctctgcaactcaccccacaaagcaagaaacaacaaaccttgcacagttgcacccccctccctccgtcgtcaccaccaccacatccagcagcagagccagccaacgaaaatgtcgcgcgtcacagctgcggcggccctcttctacatcctcgccgtcgtcgctgccctcagcgcggccgccgaggccccggcagcgtcaccgaaggctgccactgccagagctcctgccaaggcacccgaggctgctgctgccaagaaaactcctgcccccgctaaggcccctgctgctgctgccgtcgcctccacccccacccccgccgccgccgcgcatgccccatcgccgtcgtcgtcgtcgtctaggaagtctggtccagctgcagcgccgaccaccgcctctactacaccgccttcttcttcgtccaccgacgaggagttggtcccttccccggcagccgcggcggcgacgcctgccgctgatgggcctgctgagggaccggcggctgctgatgactccggtgctgctacccttggaagcggagctgccatcgccgccggcgttgccgctgcggtcgctaccatgatcttctactgaattcaccagggatcggccgtgccgtggaacgagggtggacacgtaattggctgtgccgtatttgctcttgcatggtcgggagggacgaccaatgcaagtgtgtttctgctttgctcacttcgtttgctcttgcaacattatggggtcaaccgttatatatatatatataactgaatggatttgattaattgatacaactggtctctgtctgtcatgtattctgataatggcttgttctctttctggtttttcatatttgtttaactctacctaatttgaatcataaacaaaatcttcagaaatacatatgttagataataacttttgtaacctcaggccaaatcaaagtggaatcacacattaatgtgtatgtaattaaacaacctgtgataatgtgctagatcgggaaattctcaaaaccgccagaaaaatatctaggtaccatgtatgtatcacacgttaggccagtctcaatgcatgttttatgagaatgtcatgcaaattaaataggatgccatataagcaaaattgctaacttgacagggtcattaaatgaaggattttcatcagatgagagaggagttttatccccatgaaactcttgtggctcggttacctagtttataatcttggtaactatatcatgaaactatgcattga

SEQ ID NO: 5044 - DNA, 3695 bp, Sorghum bicolor
ccgaaatcattaggggcctagatgctctttcaatactcccaagaaattttctgtaaaaaccaatgaggatggttttagtacttttcaaaccggcttaggccggtttttgctatcaaaaccagcccatgccagtttctagactgtacaagctggtccaagccagttttcctgtactgttcgaatttggattgtatttgacatgatttgcaagggattttagcctcccacgggttaagtttgccccaccctatatataaacggtcatgggtgattgagcacagtataatcacatagaacacaaatcaatctacttttacctaacctttctcataatctcttccaaacctcatgatgcttctcctctcttgatcttgaccaaggttagcaccctagaattgatgactaacctgcagggcaatctaccaacgttctcgccccgatagggaccctcttgtgcgagagctttgatgactgccttgttagtttgtctgaaaactagacattcttcgttatataatcgagatagctatcatttgctggtttgtttgtaaactttgttactctccaccgtgaaagcatgttggttatccgtgggctctatgatctatttaggacctgtgtgttccagcgttctgagtttgggaccgacgttcgcgtcaacctttgctgctaattgttcaaatattgaatactcattacaattttcaaaagcatacaaatttatgtctttatgaaaagctagggcagtgttgtgagagcctacctgtaatatgatggctgcgtgactgcaccgtggaacatgtgacgaaagcttattaagaaccaactgacgtacaactacgggcctgtttggtacagctcacaacagcttcatgagctgttgtgagctgtttttttttgccaaacacttatttccaaaacagcttcatggctgaagttgtttttcccctcctctcacaaatacataagtcggatgaagctggaaaaaagtagtttattgcagcttctccctcatttctctctctcaactatgtatgaagtagttggtgaagctattttgtcaaacactttttccaaaacagctcagctttatctagaaagtcactcatgaagctattttctaaaaaaaacagttttactaatgaagttgagctgtgccaaacaagccctacaaatatggagaagcaacagatttgttctttgcttcaaggtagccgattaaagcgaccaatcgaactgatggtgcctgtttattcctcgcttccacctctacaaaacacctcgttgaaccgtgtggtgggctccaagattctgtccctttctgattttcgagctgacaatattcaaatgacagggatatgatactcagcgcttctggttttctaggtctggacatttagttaattatggttaaatcggttcaattaccaagaatttcagttttgataaaatgttaacagaatatatgttgaaagaactatttttttttagaaagactgcaaaaacttgttgtatttttattaggtggataaaagagagagagaaaaaaaagcctaacaaagatgcatcttgtaataaaacaaaaggaaaaacaacaaaggaagcttcctatttcgtataatataataggatgataaaaaggtacccaattgctgaagctaaatactacttcctattgctttgattcttcaatagtagaaaattgtcacacaaatagtagaaatttggttcttcagtacatgaggaacatgcatgggattgtccgattcctttcttctgcatgtagatatatacaatcctatatgtatgcatgcatccattctttgttttgtcgtctttaataaagatgtaacattggtgtggaaaagttgtgcttgcttccagagcttgcaatggagacgatactcacaatgcaagggcgttacaggaaggcacagacccagtatatatatatataggcaacgtgtacagttcgcttgtcttggaacatatgcatgtatgtgctcgaccaaactaaaccccccaaattaaaatgtcttgtccgatcaatgtcgaggaagcacagggaagtcgagccatcagcgtggccgactctgctccgggcgacacgaccctggagatcagtgcgacggggaagcgcggcatcccggtgttggtggcgccggcgccgctgcacagccagagagactgtgatggccgagcccgccgcggtggcgccactgcagaggagatgatgggcagcatggggttccagggcttcctcctcctggaggcgagggacgacgacgacccggtggcgcagcgcaagaagtggttcagggagatgcgcgggtggctgatggtgctggccaccgtcgcggcgtcggtgacctaccaggccggcctgaacccgcccggcgggttctggcaggacgacaacgagcaccaccacgccggcaacccggtgctccgggacaagcactggtcgcggtacatgatcttctactacttgaacgccacggcgttcgtgacgtcgctcgtgatcatggtgctgctgatgagcgagcggttctaccacacggaggccaaggtggtggcgctcatgctcaccacctgcatcgacctcatcagcctcatcggcgcctacatcgccggcaccacccgcttcttctcctcctgcatctacatcatcgtcatcgcctgcgttgcctttgccggggtcatctacatcggagagtacgtgtggtgtgtgatatatgcaatatacatgtgcttgtgctaatcgaatggaatgcagcttcatgctctttttttttttgttgttgatttttgcagggtgatggctgaaatatgcaagttcttcatgagaaatatgccttgcatgctccagctggtgcagagcaggtggttcccggtgccggctgaggtggtgaggagtctgcagcagcagcccgaggagcgcattagccagacgagaacgacggcgaggaacaatcagcgcggtggctgctgcgcctgctgtgcgccgcgtgcggagggctgaagaacgtgagagggcaccacggtggctttctgcttctggaggggcagtgaacagggatttgattgagcgcaatgtagcatactagtaggaactacagttacaaagaggctttcaataagccccgccttccagtacttttagtgcacattattttcccgcaactaattgtagtacacacctgttgataattaataaaggctgcctatatatgctacatcatgtttgtctttttatacttgtctggttatgtatgatctatctccacttgagttgaggtggcttgagctttctggttcagttggtttagcacctggactggattcgtcagtaaaagaatcctttctataaaaataaaactgtatttgtaaccattgaactagagtttttgaccgaaaccgttgaactatagttgaagttcagtactggccgccaatctcagaaacttgataagggcactcacagtgcagactctaccgtggagtctatctctattaattacactgccacataggcactttgctgatgtggcaggctaataaatgaggaaagagggtaaaaaatgaagaaacgacgtctaaataagacgccgagtcgtcgttccattcgaggccggaagactccatcagactcgcgttgggtgagggcagcgtcgagtctatggatcccgtatgcc

SEQ ID NO: 5045 - DNA, 5528 bp, Sorghum bicolor
tgcctcagtcaccttcccctaccctacgtacatacgtgatcgtcatgcgctgtatgtatgtactcctatgtatgcattattctcaacacaacggccgctgttcctacgtgtcgtcccagcgttaaaatttgctgttttttacctgtgtatacgatgagtaattggccatactcaacccaatgagcattggctaagcttgagaaaattcaaggggtgcgtttgtcttatggttgcatagatttttattttgagggtgtgaatatggtgaaaatttagttatgctttattcgtttgactgataagtcatggttgaaaatactgtttgttgatttgttgtgagagaaaaacattactgaatggctggcatgttcggagttgcggctgcacccactatttactatatatacatctgcccatgccaatgaggggcatgtatttgaaaatacaccgtgacaattacagaaagaatcacaagtttacagttacatttacaactgaaattgataagctactaaacatgtaacaatcacaaatcaagaatatctgactcttgccagacatgctgcaattgccttaacaaccggtcatcaactgccgatcttttgacaaggaatgaagttgtttctgataaataccaacctaaaacttttttacatgtcttatttagaggaacttattggttatggcgttggacatagttacaacttataactgtgtgataacaacaaagaacatattcaccaagtatgtctggagctagaagtggtgaccatccattttttgcttactttggatggttaaataatgtttgaattgagtttttaagttgaccttgttatatgatatgttaatcttgtgtaataagtggtctgattcccttagacctcgtttggttagagggaattggtgggagggaatgcaagttacagaggaagatacttaaactctcttgtttgtttcgtgggaaagggagttgagaagtagaactcccatcgatctcttcccacagggctggtaattcatcggtgtggcagggagttcgaggcacaaagacaacatatcctgcaattcagtaataatgttatcaattcctatgtccaagctcacgtaccaaatggtggactacaattctgtttttaaccccctatatcaattcccaacactaaccaaacaaaggattattgggactaaaaatcaaactcccacactaatttcctcctcaaactcccacctccaattcccatgcctcttcccatcacttgccaaaggaccccttagtgctaagggatgaagcaggattcaattctttttatctaaaaaaaaaactgctgatcttttgttactgtggagacgggaggacaattgcccaagctggcgttgctacttgcagctagcttgcccatccatcatcgctcctgcagaccactcctgtagctacatacattaacaaggaccactttataaataacaggaggccatgtccatgggcattcagattcagtagctctggccctacgcgaggagaaaagcgatccagcctttgcattgatcaatcacagtcacaccaagccgaggacaagagtaccaatcaaaggattaacattgctactgttgacgaaactggcgagtttctatgaacaaatatgtatggataaattaaaatccattgcattatttacatattttatttttgtggttatgtatgtagtcaactggtatacaaatactgctagttgcttgtaagcaacacatgcaattcatttccttggcatatctctagtctaatgaaagtacaataataccactactacgatcagattatttcacagatgaacacacattgtcagcggaaccggtagaatttatgcataacctgccaactgcaggacccaacgaacgaataatagcatataccacctcgaaaatgtcaaattaagagcaaacaaaaccacaagaaatcaccaaatatatatatatatcttcccccggcggccgcggcccttcatcagcaggggaggacacacagagcgtgtcaccaggctagaggctccggacgacgactcctgctcgtcttcacattcttctaatacctcgctcgcccgggtatggcagagtccggtggcggcggcggcggcgtagaggacgccggctgcctgccaccgagccacacaaacaacggtggtgatggcgccggaaacctgccgccgagccacgccaacggcggtggtgatggcgccggcagcacgtgggagatagaggagctggaggagccggacgatcggccgccgcggagcgtcgccgtcgccgcggcctccaccgcgtcctccggtgccgacgacgacgtgtacgtggcggtcggcaagggcggctccagcatggccgcgctgtcctgggcgctccgacggctcaccaagccgcggagcttcgtctacctcgtgcacgtcttccccgtcgtcaccagcatccccaccccatgtgagccatctactacagtacttgattttgattggtctctctcctcttctactcaattctcatggccttcttcctcatatgttacatcatcttcgtttctagtagtataacatgtagcacagattagctacgactcctatgcaattttgatgattatagcattcagattgcctctgattagtagtgttccgtttggaacaggactattttttcccccttgactctcataggatagggatcgatcaaactggcaaactgcttcctccgaaattcttggcttacagccaggctttgtggcctcaaaaacatcgatcattcgatcatgtcagagcatctccaaaggctttgacaaattaacttgacatttgttgctatttgtaaactcccataacaaaatgcaaagataaaaataggtcatctccaagggaattggcatttggacttggcaaaggacaaaaatagaaggtctccaaacgcgcgcgcttttctcacgcgtgactttgctcgcgcgatcgggtttgcaaagtcgtccacagcttggcatttttaccaagtttgctcccttatttgccaagttgcccaaattgcaaactccaaatgcaaaaccgttggatacctcttttagatctttttagcaaattactcaaatgcaaaccttaaatgtaaaatccttggagatgctctcacaatatacttcacccttcctcaacccaacttgaacaaaatgtgtttaatttgctcactagctaatggaaaagtaagagtgaaatgaatgaagactaataccgtaacaactagtagtaagacgacacaacgctgcaatttgcaaacaaagtcttgtttagggtcgccaatcaatcaataaagatgacgatggtcgtgatggaagacgacggtccagttcttgcactggtattttcgagattgattttgttcgcctgactgaaactttcaaaggtgtcgtcgtcgtcctcacgggccgggagttccctttggagccttgtaacctcttgtgccaagaatacattgggtttggccccgacgcaaagctgcagcagcaaagctccaaacggttgatgctgaccttgtaggggatgggagtcggagacacattatgctgacctcgtcctaattgtatttttcttttcaattttcgttggcaaacgaataatggggttgggatctgtttggtgatcagcatggttcctgtcaaattattgggttctaatcaaactgtttccagtgaaattcttgggttataatcagaggcttgtggtttgatcatgaaccaaacctgagtttcgctttagtgaagcacttagaatccattctcaaagatcatatatgcatgcatccattatttgagattctaatgctaacgagattcgtggaccatacaggaataatactggatgccaaaaacaaagtagctttgtgatgcgatgccccttagagtagagcgcatagtatgcgatgtgatgctatagagctagactgcctgccactgaagtgtgaacaagatcagcacggtaggattccgttctgccaccttttagtcctgacaaaatggcacaaagatgaaaatagactttcagctggttcagtaactaatacatacaaaaggaaaaaaaacaaaaaagatagatgtcctagtttctgaacgtgttactgtccatttctgcgattgatgatgatttaagcaatattcagttaaaaagggtaatttgtgacgaatctgacacactgtcaatttctgaaatagtaggaatgatgcctaagagccaagcaagcccagagcagatcgaaacttacttgaatcaagagagatcaaagaggcgacagatgctgcagaaattcttggaccagtgccgcaaatttcaggtaagcagctggaccaccatttcgttaccaattctgatttctcaacaagttttcagttttgatatcactattttcatattcaggttaccgttgatgtgtacctcatcgagagcgatcagattgctaatgcaatcatcgaacttgttcctattctgcacattaaactgctagtgttaggggtttcaaagtcaaatgtgcggtaaggtctaccaggccttcaattaacagaaacacaaaattgtgtgcatgccactcctgcctgcaaatatatgctgaatctgtcaaaatgaacacaggaagatgaagagaggaaccacaatagcaggacaggtacagaagagcacacccctctactgtgaagtcaagatcatctgcgatggcaaagaggtgacgacggagacgaccgctgacccaacaccaccactgtcaccttctcctgttaacaacaacagcagatccaacaacccgacaccaccatcatctacaccaaatcacgataaaacaggtgcaaatggtgacagaaaatacaatgaacccagagagagaaagaaaatcacaaagtttctgagatgtttctcgttatgattatttgtcatgttcctgtttcatttaccttctcagagctagcacactgtatgcatcatgattggacagtataagtttgtgattatcatttttgccaatgcttctgttactggaagttcttgacttcttgtgtacaaaaagagattttcatgtacatgtggaaaccttttagcattttgtagatttttttttttttgtgattaagagtttattttcctttccacccctttccttcactagatgaaatgaagagttgtatttaactgtaaagagtaagaaaacacatgaaaattacaagataaaacatgtaggaaaccagagagtatcttcctcagaagaaagcttagtacttccagctggtcaaaatagcaaacgcaggcaacacaacacttctatgtgcagccagaagaatggtacactgtttactcatgtagccagaagacagcctagttaaacctgattgagacaaggagtatgggatagtacacatggctctgtaagtactcagcagtcaacccatttataagcagatttttttggctggcttctgcaagttagggatgggattatgaaaaaccagtaagttg

SEQ ID NO: 5046 - DNA, 5460 bp, Sorghum bicolor
gctactctgcggaattctcgcacgccctcaatgaacttgttggagcagcaatcggcattgtacatccaatggcgtgccattatctgcattatcatggaattgtaatttttctattagaagctataattttatcactaaagaaaattaatttcaagaatttttaaagtgaaaaacaatttatttaacaattacaacaaaaattatattattaatattttaaaataagaacatggccatattaaagtaaaaaatatcctataatatctataatagaactaaatatgattcgtgtatacatagtagtaatgatttgtgtatactagtttctagcgggcacacacttagcatcgttcaaaaaaattcaaacatgagaagatgatgattggatagatagcaacatgaaataattaaaatagacatatgtccaatatgaaattacatatggcggtgagaaacataggaggatgaagctagcagcctttcaaacaaatcgacgacggcgtagaagcgttgaaatggatcgatcgcgagagatgagagcaataacaagcaagaacaatggaagaacaagaaagaacaaaggtcctcgggctcgggcagggagaggaagaagggaggagggagattcaatttatagcgggagggtttagtcccggttggtgttaccaaccgggactaaacacctacctttagccccggttggtgccaacgaccgggacaaaaggtttagtcccggttagtggcacaaaccagggctaaatgtaggtctttagtccgagttggtaacacacaccgggactaaaggtccctccccgatagcgtctgacaccggagccgttggggagggaccgttagtcccggttggctttaccaaccaggactaaagatctcttttgtcccggacgccaaaaatgccgggactaaagctcatttggcaaatcgacgaaaaatctgttattagtgaactgtatgaatatgttacaaaaatagagagctttagtcaatttttttcttcggagcaaaagaaatagttctattatacaagctgccaagaggggcatgttatgttagtcgttggattccaaagcaggccacgtgtcgtgcatcgggtgaggaggctcatcgtcgatggaatgagcccatagcccacccaattccctccctgaaactctgcgtagaacttttttttttcaagaaaaggttgctctacggatgaagcaagcaaacgcgtgttagggccctactagggcgctcgcaagccatcctcgagcggtttggcggactcgcgctcgtcgcctctccaatccagagcttctagcgtgggaccggaagaatgcccccgcacgtacgtcccgatcggtgtagtccaggtcaattgtccacaggtaccagaaaaaagatcgataccagaatggatccattggctgcattgcacccccccaagtacatggttctggaaattctcagatcaggggaccaattacgttgccagaattttttaaaaaaaaccaaagtaggctagaaattttttaaaaaaaccaaagtaggcttggctaggcaagcttcacacaattgtgagtcgtcgagccctagaatgaaaatgctagatccattattttcgagttgaattcaaaattggcgcgctttggcgtagtgcaaatgcgagttgccgagttgcgacgaccaacgtctagctagtcaagaagaatatctatgcagccacgtcggaagaatatatgccaaactctcaagtcctcaagtgtcaagtcttcttccacagaaggacgatgttgctgcatgctaccgtgaagaaaacgttagcatggacgcgtctgctgtcatggtctgttgaacgttgggccatgcatgacaagggaatgcaataatgcaaggcactgatcgcggcgaggcctatatataaatgcagcacttgccatgcctaaggcactccatcatccatcaagcagttcgctgtaagttgcgaacgttaactatataccatggcatctccgtctccattattggcgctgttcgtggttgtgctgcttgctggtagtgccagctccactgttgatggtgcagatgcgcaaaggtacatagtcgtagctactagttcgctgaagccatcagaagtctgctcaggccataaaggtaaaaagtctgctcagagtaattgactaatttaattgtatctatatattattcaaaaataatgatagctaattatacaccaccaaatacgcactaacactaatcttgttatgataaaaactaatgggatataaaatacgcacaaaatatattttaatcgtcatcatatttgcacttatcaaaaataatattgccattatagttactatatatgtaataatatacatattgataatgcttaatttattcactaataacaaagataagaaaacatggatgaactgtctagcatgttttggtggcacatatatccagcttttggaaaaaaaatacacttctatcggaatatctatatagactcactcataaaccaaacaacaatccatagatggctcatatcacatcgaccaatatctatccaaccaaacgcaccctaagagcctcatataaaatcattaacaccaaatgtactcaaggaaaggttcttctattacaattagtaacagatatgttgtcctagctagtcttataaggaaatcttgtgagaaggtgatagtgcggcaggtgtgttgaaagtcaagtgaattggcacgaccggctgcttataactactttctctgtttttaagtacatcttattaactttgtcctatgtcaaatatttatatctgtaaccattaattttttaaaaattacttccttcatcctaaattataagtcattccaagaatattgaagagtcaaagcatatcgagtttaaccaaatttatatgataagataatagcatttgtgataccaactaagtatcattaggttcttgattaattatattttcatagtatatctatatctatttcaggtcctaaattttagtaattcttctataattttggtcaaatttaagatgctttgactctcaaagattcttgtaataacttataatttaggatggatggagtatataggttcatgacaaaagttatgtttttagattcagtatgaaatattttaatatataatatataattataggtgatgaacttatggggattttttaaaaaagggattgtctaggaataatgtttgacttagaacaaagctaatatgacatgtaaaaacagaaaaggtgtatacaaacactatttatttatttatttatattataaaaaatcaattttccttacttccaaaaaatcaattttcctaaggtggttggcttggttggttcacttctggaaaataacatttagaggcagttgcttgcttgtctctacaaattcattagctttatcgattctaaaaaaatatgtcttatacccgcaatcagaaaactggttttctataatgtttctcatggtccagtatcctgatccagttaccccgtccaagaacggttccacgctagcactgagccaccgtcacggcccgtgctctccggtcatctccaaagagaagccttcgcatgaggaaacgctccgccgagaccaactccgtgccgcctacatccaggcaaaggtttcttctcgatacaataatgtcgccaaagagctccagcagtcggcggtgactatcccgactagctccggctactccctgggcaccacagagtacgtgatcaccgtcaccatcggcacgcccgccgtgacccaggtcatgagcatcgacacaggcagcgacgtctcgtgggtccagtgcgcgccgtgcgccgcgcagtcgtgctcctcgcagaaggacaagctgttcgatccggccatgtccgccacgtactccgccttctcctgcggctctgcccagtgcgcgcagctcggcgacgagggcaatggctgcctgaaatcgcagtgccagtacatcgtcaagtacggcgacggctccaacacggcggggacgtacggctccgacactctgagcctcacctcgtccgacgccgtcaagagcttccagttcgggtgcagccaccgcgcggccggcttcgtgggagagctggacggcctcatggggctcggtggcgacacggagtccctcgtgtcgcagacggcggcgacctacggcaaagcgttctcctactgcctcccgccgccgtcgagctccggcggcgggttcctcaccctcggcgcagcaggtggcgcgtcgtcgtcgcgctactcacacacgcccatggtgagattcagcgttcctaccttctacggcgtgttcctccagggcatcaccgtggccgggaccatgctcaacgtgccggcctcggtcttctccggcgcatccgtcgtcgactccggcaccgtcatcacgcagctgccgcccacggcgtaccaggcgctacggacggcgttcaagaaagagatgaaggcgtacccgtcggcggctccggtgggcagcctggacacctgcttcgacttcagcggcttcaacacgatcacggtgcccacggtgacactgactttctcccgtggcgccgccatggacctcgacatctccggcatcctctacgctggctgcctcgcgttcacggccacggcccatgatggcgacaccggaatcttggggaacgtgcagcagcgtacgttcgagatgctattcgatgttggaggcagaaccattggattccgctctggtgcatgctaaatttctaggatgatcgagccaataatgttcgctacctaagagtatatatatcgctctcgtcaatcaataatttttaaggtaatataatgtggtaaaatatatatagtcccgaagtaatgtatttcattgaaatacaaccgaataagcatgaatgaacatttagatgttgtttatcaacacggctgtgaaaattttaatcacgagtatagattcagtagtcgctggtgcagcgtgagtgagctactgtttacaagcacatccggattgacgggctttgccgagtgcggcaacatagaacacgtgacaaaatttgaatcggaaaaacctcacaaaaattgacctccctctcacgtgtctcctcctctaaccactacatcacattatcacttctatatcttatttattttggttcctgttgacagtaattaactctaatttttaaccgtcaactaaccacaggagagacccaaaatgacttataagtagggatgaaaacagatgggatacagatggatatcactgatatcatatttcttttcataattttggtcggattcggattcgaatacggataatgtcaaccatgtcggataagatatgattggatgtcgatatcacaaatatacgatttaagtattcggatacggatacggtatcggatgttgaatattcggactcggatacgaacag

SEQ ID NO: 5047 - DNA, 4188 bp, Sorghum bicolor
agtcaagtgtgcatccaccactgtctagtgccttgtttaggtcaagtgagagttctttgcatgttactcttggtgatcgccatcacctagacggttcggtggtgattggaggcacgaagaccaacggagttcttgtgggtggctcgtgtcaagcttgtgagcggttttgggcgattcacctcgacggagtgtcgaagaatcagcccgtagagagcacttggtccttacgcggacctagggggagcaagacccttgcgcgggtgctccaacgaggactagtggagagtggcgactctccgatacctcggcaaaacatcgccgagcactttcttccactactcctttactttctagcaattactttgtgcttttacattcttagaattgccatgctagaataggattgaaactaggttgcaaaacttttatccggtagctctctagtcacactaggcacaaggggttgaattggagcttataggttgcttaaatttttagagaagcccaattcacccccctcttgggcatcttgatcctttcacactacaacggcaacgaaactcttattccaaacaacgatgatcatttgtatctgttttagacattgggagaaaaaactctatgtatatatgtgttacgaattttgtacttataaaactatatataaagctttttacatatctatttaatttttgatgtggcctattcattttattataggcaaagcttaattataaagctaagcctctaattttcatttatatatgcttaatatgcgtgtaatataaatatattattgtatcagcaaaaaatatgtattaaaaacctattattattatataaaacaaaaaatagaaccgaagaagtgaatcaaaaaaaaaaaatcctttaacaccggttggtagggtcctgcaacgtggcaacctgtcaggaccctttaaaaccggttggtattaccaaccggtgttaaaggggggggctttagccccggttccccgaaccgggactaaagggtgggcctttagtcccgaaagggcagcaccggctcggaaaccggggcaacaggcccttctcgaccggtgctaatgcccgaacgtgcagcagtgatgtatataggccccatgtggacaatcagcccttaaaataaaaacctcacattctcaccttaaaattttagctaaatctactcaaaaattttaagatgactttataattgcttgctactttaatttgtgcatatcgatgtgactagatatgggcccaagatataaacatgaagtatacattaaaaattgatgtacctctcaggtagctaagttcatgcaaatctaatggacactgaactttttgagttaatgtacaatacattttggagtttttttgaatcaaatgactatggacattcaaattcaaatatatcccatgcaagtgcatccaaatgtaactaagtccaattagaatttggattatccattttgtgtcactatgtatctgtgtccattttgtggcaatgtataatttcattccatgtcactatggattatctttgtttccttttttaagaccctatttggatctagcttattattataatctagattatatatcgaattattataatctacattatgattataaaactcagtagtgatttgatgtctacattatttatggtggttattattggttagagtgacgatacctcattattgcattacaagatactgtaatctgctagcattttgattataatgaactattctatagtgtagccggttttggatcataattagatagttttagctgattattataatcctaataggatcaaacgtgccctaagttgtgatttgagaatttaataactaactaaaatataccaaattgctataaaatacaactaaaatttgccaagtaatgatgtggttccaacttcaaacactttataaatacgttggcgggccatccttttcttagtactcaaatgcacatcattttccatggcttctcctctgctcctgtgcattttcttgtgcttctacctctccattgttaatggagctggtaacggcagctttgtgacggtgccatccagctcttttgtgcctgatactgtttgctccggagcgttaggtacatgacctgcagaccatttctggtctatttcgatcctttggcccttatttagttcctaaaattttttagttttgatcgtttttatttgaaaattattgttgaatcatgtactgattaggatcaaaaaattcatctcataatttacaagcaaagtatgtaattagttttggtttttgactatatttaatactctgcatgtaccgtaccgtaagatccgatttgacgagaaattttaaaatttttttgattttggatgaactaaaccacgcaacccttcaaacaaaaccttatgattctgcatatgcatgtttcagtcaagccggagcaaaacggctccgccgtgtacgtcccgctactacaccgccacgggccgtgcgcgccgtcgctatccacagacacgccgccgtccatgtctgagatgttccggagaagccatgctcgcctgagctacatcgtcagcggagtgccgatggacacggagacatacggagacgcgaagaaggtgagcgtcccggcccacctaggcacctccgtgaaatcgctagagtacgttgccacggtgagcttcggcacgccggcagtgccacaggtcgtcgtcatcgacaccggcagcgacctgacgtggctgcagtgcaagccgtgcagctccggccagtgctccccgcagaaggaccccttgtttgacccgagccactcgtcgacgtacagtgccgtcccctgcgcctccggcgagtgcaagaagctcgccgccgatgcgtacggcagcggctgttcgaatggccaaccgtgcgggtttgccatctcgtatgtggatggaacaagcacggtgggtgtgtacggcaaggacaagctgacgctggcgcctggggccatcgtcaaggatttttacttcggttgtggccatagcaagagctcgctgcctggcttgttcgacggcctccttgggctcggccgcttatcggagtcgctcggcgcacagtacggcggtggtggtggcttctcgtactgcctccctgcggtgaacagcaagcctgggtttcttgcctttggtgcggggaggaatccatccggcttcgtcttcacgccgatgggcagggtccccggacagccaacgttttccacggtgacgctcgccgggatcactgtcggcggcaaaaagcttgacctccggccgtcggcgttcagcgggggcatgatcgttgactccggtaccgtcgtcactgtcctccagtcgacggtgtaccgggcactgcgggcggcattcagagaggccatgaaggcataccggctggtacatggtgacctcgacacttgctacgacttgacaggttacaagaatgtcgttgtgcccaagattgccctgacgttcagtggtggagccactatcaacctggatgttcccaacggaattctggtgaatggctgcctcgcttttgcggagaccgggaaggatggtaccgccggagtactcggcaatgtgaatcagcgaacgtttgaggtgttgttcgacaccagtgctagtaaattcggcttccgggctaaggcctgctgatgtacacaaaactgaataataagatgataatcaagggcatgtagtttttgttttcagataatcctttgtgagaatacccagattgataatattgagatttgagaccctgtattatcatattttctttggaaatgctttcataaaagtaataaaaaaaaaacaaggatggcactataaagttatctaactcaaatgtgtttagacctgctgcatgcatacaatttgagtatgtgagatgtatcagaatacatttatttatactaagatacacaggcattggccattgatatagttgttctattatactttcttgcttcttttttgtttttccacagctagatctctctcaaaggcctggtttatatcttttatcaaaggtgtgcaatgctgttgtcaaaatagaagatgagcacactttttgtctattgagaaactctacccatttctctaattttcaccatactctctgtcctctaatacagtgtattatagcattcaaa

SEQ ID NO: 5048 - DNA, 7135 bp, Sorghum bicolor
ttattacgactggtggtcagagcaagtaggctaaacaatttggtcgatggcccgagcaggtcggtgttgtcgatctgcctctctttgtagcagagaagcgggtgacgcgttgtcggcgtggtcggagacgttgctggagtagtcggagtcgtagccagcgtggttgaagccgccgccgacgtcgatgaagaagtggttggcgcagatcggatctacacctcctccgtggtcatggcggtgaagttgttgaagctgacggtgaacgtgaagtcgcccgccatggccgcgaagtcggggatgatggccatcttgttcgtcgggagagctgtacgcacaccccctacctggcgcgccactgtcgacgaaagctggtcggcagtctaccttggggtatacccacggtagtagtttatcggtagacggtgcgcaaactacgaactcgatggtgacgcaagacacggacaagctttttatccaggttcggccgccgagttggcgtaatacctacgtcctgcgtctggttgtattggtttgtgttaagagaatatgatgtcctaggggtcccttgcctctccttatatagtctggagggcagggttacagatctggaaactaatcctagtcggttacaattgccatggataattcgatatcaattcctattctaaccgactagaatcctgcttgatctccccatcttgtttccttgcgcgaaactccaggttgtcggatcaagccttgaactcgtctcgtaatgggccaagcttcctggccaaagtctagccgtaagggtataggggtttatacccccacactgtacaattagtttttacttttgtctatatttaatacttcatgcatgtgtctaaagatttgatgggatgagaaattttaaaaaaatttgaatttttgagtggaaataaacaaggcctaatacgtccaggtgtccccttttgctgacgcctctgtgtagacaaggctgacccaggcctaatacgaattctgcgagacactgacgaggctgacccaccaaaggcatatagttttttttttaagtgaaaggcgtatagttggtgccgcggactacagtaggacacgtgagaatcccaacagctaggcgggcaataaatagcttccgaaaaatgacatgacagcatcatgtgaacacaacgcggaaaaagcggtttttcctctagaaaaaagaaaaccaatttcacaattcatgtgaaggctgacgaaaaggtaaatatctctcccaccagcttttcagtaaccccctcggttaccgcaaaattcgcagtagcggaaatagacggccagaaaaattggcaaaagacagtaaccgcagcaaattctgcgtatatccggggtcctcgcgaaaaggcatacgctcccctcctctctattaatccctgctgggctttacacattttctcctccgtcgattacagaagcttttttttttctcttctcagtatttcggtcgagaaattcgcgaaggggtttggggaattcgaggcaaggatttgcaaaaatcatgggaacttgatgcggcttcctgtgcccgtcgctaatttctctgttttatttgcgtgatttttagggtttatctcagagttttttttttggtttctccgccgtatttcgtagagaaatttgtcactgtgaaaaattcgttttttggtttcttccgtgctactgtgaaattcggaatcttgtcagagaaaagagaaggaaaaaggaaaaaaagagcaaaatagtaagggggatttttttgtacctgggtgttttctgttcacttgagtaagtacactctcctgtctagtacgcttcttgatctcgcagaattcgtcgccgggacttggaatttttgagctgatggccgtcgtgtttgctctctaggtcggttaatcttgggagtgcctggctccagcgagatcgatcgaaaggagggacctttccttggttcctctgctcgagctgtgcttgcggggtgaaccatgtcatcagcgatggcggcggcgagtgaagcggcgtatggcggaggcgtgcagaaggggtccctgcagcagcaccaggcgccgcagcctagccccggctcggtcttctacacccctgacggcatcgccgtctacgcgaaaccggccatcccgccgttctaccaacagtccgcgggcagcaatgccatcgtgccggcggctccggggctagctcattcctccgccacttctgagcccttcaagcgcaagcgcgggcgcccgcgcaagtacggccccgcggacggcgccgtgcccctggctatcgtgcccccgtcgcagccacccactgctgctgccccagctgcctctgaggcgtcacccacgattcctcctggcttcgctccaagcccgcagggtggtggcgtggtgagtccccaggcctcaccggcgccgcagccgccggcggcgtcaggtgctcccgctgtcaagaagcggggccggccgccgggcccctccagcaagaagcaacagccgcaggcggcagcgcctggtaatgttctgccgtccccttttcaactggagcgtagaagtagtgaaatgtgcaaggcggcattgatggctttgatcgtatttctgttcagagcttcagatacacgtatatatacttgtggtacttgggaatgggcaaaacgaccccagggattagcattcatttatttatcatttcattcattcttctttacttttggtttgctgtcatgccggcagcaatcaggggtggagttgtgggcggggaatggaatacttggtgataatgacctttatgcccttggccttctccatgctagagttttcattcaaaaaaactatttggcaagcgaggtttcttgagaaaaatacagagaggtttcttcaggattcttgttgctctaagtagaactgagtagggaaaggttgtgctgctggcaactcgagaatacttctttccgttactagttcgtggtagatgtgatttattagcttattgtggttcctgtggggatctggccttttttactcttaattgtgattaatatctgctgttggcttgcattggcatgtaatattatgttgtttcagttctagatttgaaatatttttactgtattagcgcactgtttgtgtttagtttactcagttggaatgtattgaactatttatccatggttatcttttgtttactaacttaagcggtgtttgacttttgttattggatcattgcaccttcaactttgagctcctaatccccccaataaaactttgagttcctatgcatttaatagttatagttattataaacatgccgttaataccatgtgttcagatccctccaaaagtatacctatggctatggatattttgcttggcatactagatatcgtgggactatcttgaggtttatacatattaattcaatgtgatggcactatgattatgagattatatataatgtttctgaaattttgttttagcaggaccaggctgggctggatggaagcctcatattttcacagtccaagctggagaggtacactgtccaatgcttatgatgctcctacagatgtacttatgcagtcttaggatttttgtcatctcttatatcaaaatctgtatgggttatgtttacttgcatcaatttttcaagctatactagtagcatcattttcttaagctatattgtctattccatggctatgtgaagtcatatactgattaatatctattttttgctttatgacgttgtccttttgtattccacgctttttattatggtgccataactttcttttttctatttgtattacctaatgcaattatatgattgttctgctcgttggatataagatttgttctgcctcaggaaatgtttattacgcctgacatcctgctctcacttttttttaaataaatacatcctgctctgctatcttgtaaactttatgtcatgctccttagcctggacttcagcaaaccatatatatacttgcataatctatatctttagtatacctttcatgctggcctatcgttaaatggtttgagcttagtcaaaccacaatagagttagtggtcttagcctggtctactgcaagctttattgctggtaaattttttttcttaaagtttgtgttattctgtgatagtctgctaagtatgctcgttagaatggaagggtgaatacttactttgcaatcatgttactatattttttttccctgtcactgcaaacctcttatttcgttttgtccccttagcttgaggcgccttttccttgtattatatcttcattttacaaacttgtttcatgattactctgtgctgccttgtgtatttttcctgctgactgctattatgtcgggtgagcattaggtggcttgactggatcgccttgttatggaattggacagcacactccctatatgttagggcctggattccttttaaatatttattttcttttattatctgccattgttatgaatttactctctattgttgaggagttaatatagggtaggcaaggattatgaggcaaccttgccacaccactgccccactgcaccacccttactagagtgagacaccactatggaccttggtccttggctggttgtctcatgttcctcagctttccattccaaattcattttctttgtgaacttgtgctttcctggtaacctgctaaagaaggatccatgatttcaggatgtagcatcaagagtcatgtcattttctgggaatggatgggcagtttgtatcctcacagccaatggcgctgtatctaatgtgaccctgcgtcaaggagagtcttctggtggaacagtaacttatgaggtttgtagattcttccaactttgacttatcttgctcagtttaaatatcctttttttccctggtatatctgttggccacacatggctcagatcagggtaaaagcccagagggcagcttggcatatagccgcttggattggaaagtagaattacagggcatggttacacaggggtgctgccactgcttatatagcctaagtggacagccacctactatagcatattccctagcaaaaagtgcttagcctacttggtttcaaaggcaccacgatcaacttggttgccaaggaacccgataattactggacagtgaatagtaactgcagtaaataagatacatagcacttggcttaactgacaatatctatagaagtatagaactatatcccagctaaacctggagtcatcaagttcctaggtcaatgcagttaaggaacacagtatggtacttgacaggtttttacacggtggacatgagaatgttcccatgttcctgggatgggaacgacattcctagtacaaggaacatggcaccgttccatgttcccggtgaaatagaatggaaaatacaatgcataaaacataagagaaggaaggaccttttttttctggcaatacatctgtttcgcggttctggaaataattaacctatgtgcttgcactaaatttgaatgacatagtttcttgcatccaatatgcagggccgttttgagattctctctttggctgggtcatatcttctgtcagaaagtgctggcatgagcagtcgaacaggtggacttagtgtttctcttgctggtcctgatgggcgtgttttaggtggtgctgtagcaggacctctaactgcagcttcgccagttcaggttccccttttattctgaattcactatcttaattaagatctttacatcagataccttggtctctttgtgttttattttgaaggtcaccaggggggagaggatccccacctgaatataaaatttctcagagccgtaaggctaaaagttttgcaaattacatcatttagactttgtttgttctactgggtacttattacatagcagttctgatggtctctttgtttcacgaatcatgttcttacttcctactgtgcaatactgtcattgcaagtgattttccaagtgatgtatatatatacatactgtcatctgtaacacagaacatgataagatgatcagttatatttttttgggcaatcggcttttagtgtttttgcacttactcctggaggattgacaaatctctcaatggattgtgtttttgttattctgctgttcaggtggtcattgggagctttctggctgatacaaaaatggagcttgaccctggatcagcacccgaaaaacatgcttttggaagatttccaactgccagcagtccatctaggggtactgaatccttgggtgggcatgcaagcccaccaaacaccacaggctccttcagcaccagcacacagccaccaggcttcccaagcttccccccgtggaaatgagcttaccagctatggtggagtagggcgtagccgtggggttgaggagggagggatggggattagacttcattaggtactcctgctgaaggaactgatgatcctcgagcgtcaatttagtttcaccagatcgttatgagagtcgatcttatttaggtacttctaactggttacagtgaagttctggtttgctgcctgtcttgatatgttgcatcattgaggcactccaaaatgggggtagcatacagtaaattagatgatttttttcctatcaaatgccttttgtcattctcctgcgcttatttcggttattagtgctgtgcggtgtgttggtagaagtagcgttttcaggtctttgggctgcattgttatgttctgttgcacctcattattccattaggtcttgtttggatgtagtcagattttttgtgaattcatatgcgttggagtggattgaggtgtaatttagttcaagttactgtgttatagtgaatctgacaacatccaaacaaggttttaatctaagcatgttttcatggaacaatgtacttcccaggtttgaacgcagttgtcatgacagtgtgagtttaggggctagacacaaggcgagacgactaagggcctcagcaactgtggcggttgcagctcaccctcccaggttactgcgctaataatgtacatatcacaggttatgtgctattactatacacttcacaagttactgtgttattgctatacacaacagttgctactgcaaagtagctcaactg

SEQ ID NO: 5049 - DNA, 6119 bp, Sorghum bicolor
atgaatattaaaaagagatcaatcttctatcgatgttgaccaattgctgcagttcatccttcgaacaatggggaggcaggggtctgtttttgtcattcatacttttcataatgattattcactgaaatgtttcataaatctcattatttctttatttgcatttttattagttaactaaaacccatggtagggttaggtgcacttttactcccttttgcatggtgtcatggactctggtagaatagcactgcaccgtgacattggtattgtggtacatactacattctttctttgtcgcaaatataggccccatcaaagtttgttctcggtgatagatgtaaaaacatgttaacttaaacaagtagggtatactttatgaaaacattttcataacgaaatatgaatgtcaatctcctgttctcgatctgaatataattttagatatggacgattgaaatgaaaacaaagacttagacaaacctaaattgaaggccttgtttagtttccacaaaaaaaaattcatcccatcccatcgaatgtttgggtatatgcatggaacattaaatatacataaaaataactaactgcacagtttgcatgtattttgtgagacgaattctttaagtctaattagtccatgattggtcaccaattgctatagttacacatatgctacaatactccaaaaacttttctttttgccaactaaacaaggcctagttaccaccattagaagtactaacctatcaagttacagaaaggagatcatgttggcagatatcagaaccataatactaaacataatttagccacacatgttccttatggtttttttattatagacaacgtattggtccatatcaagacattgatgatggcttctttaatttagaattttttatttagtcccttgaaggtgctcttaggataaaaggtgttcatgtgttgacaaggataaatgaatacacatgcctcaatatattaaaagaatcatattggcagatatcaaaaccataatacttaacatcatttagctgctcatgttccttgtaattttgttttttatgatagaaaacatatgaagacatcgatgatggctttttaatttaaaatttgttgtttagtctctagaaggtgctcttaggataaaaggtgtttatttgtttacaaggataaatgaatacatgtacctcaatatctcaaaagaatcgtattgacagatatcaaaaccataatgctaaacataatttagtcgctcatgtttcttataattttgttttccatgatagacgacatatcaagacgttgatgatggcttacttcatttaaattttattatttagtctcttgaaggtgctcttaggataaaaggtgttcatgtctttacaaggataaatgaatacatgtgccttagtatctcaaaagaattatattgacagatatcaaaaccataatactaaacataataatttagcaactcatgttccttgtgattttatttttttataatagacaacatatcaagacatcgatgatggcatatttaatttaaaatttgttatgtagtctcttaaaagtgcttctaggataaaagatgttcacgtttttacaaagataaatgaatacacgtctctcggtatctctaaaaaagatgcgacagccgtgcaatcttctattgtaaataaattatgtacgcctatctgtatgatggttattattttaataaaagaatcaaactgtcaaaagatcagcacattgcttttttctttttgaactttcatcacattgcttgagcctcgagcgagcggttgcgcccctgccgtaacgttaccaggaaataccgcaatggccggtgccgcgccgccgcccaagcacacgctccgctcctacccccaaagagtgcgggtgtggtcagacgctgacccgccgcacgccacgacagaggaaagaacacgctgagagagagacgagacctcaccgcacgggcagccacgtcgtgcttccgtgcacgcacacggcatacgacagcgccatccctccataaaaggatccggcgcagcgccaccgccggatccgacggcctccgaggcggggccgaaccgccgaggtagccaagacaacacgagcaacgaaacgccatccctgccggattagtgagtctgctctagtcccgactctgctccagctccgggccgccgccgagatgggcgcagatggcgggctgaaccgggcggcggagaagccccgggatggggagggcggggaagcgagggtgttccggtgcacggactactcgctgccgcggacgacgctggcgctgacgctctggctgggcggcatccacttcaacgtccttcttgttcttgcgtcgctcttcctcctctcccgccgcgccgctgccatgtccgtacctcccatcccgtccatccaccccccatcttttcctgtacctactccatgattcgaccaaacaaaaatagactcttttgtggttcatttatccatcctgctgcttgatgcagagtggtggcgttccagctcttcttcatgttcgcgcccgtcaacgacagggacaaatggggccggagcgtcgccaggtacgctgttcttcattccttcctttcgtttccaaattctaatagttgggattcgcttcccttttcttcttctcggttgttgacttacgagcatgcgcaggttcatatgcagacacgcaatgggctacttccctatcagtctgcatgtggaggactacaagtccttcgatcccagcagggcttacggtgagttcccgaacctgtttttccattcatggatgctgtcgtcatcatatccattatccaatccaccactgcccacgggagttgagaaagtatcaaatttcgttgctgagggtaaagggtagggaatcttttatttgcagagtttgtggtgatagtgatgctagtgctctgcatttgcagtgtttggttatgagccgcactcagtgctgccgataggtctgtcagctcttgctgatcttgttgggtttatgcctctcactaagatcaagatccttgcgagcagtgcggtaagtcagctaaatgccttgatgcagaatgtcacaggattcagggactcccctcatgacggttaatttcgaattggggctaggtgttctacaccccattcttgagacagatttggacgtggcttggattggtacctgcgacaaggaagaatttctactactaccttggagctggttatagttgtatggtagtccctggtggtgtacgggaaatgcttcacatgaacaatgattcagaggttcgattttgtcgtccatcagcaacacatttattgtactattcatacgtgtttaatgttgcattttacaattaaacttattgtctgtttatttgcctactgtcctatgcaatcacatcaaattcgttgttttaacattacaggttgcatttcttaaaacaagaaaagggtttgtcaagatagctatgcagtccggatgccctttagtcccagttttctgctttgggcaggtaacaatcaaccatgctttaacaaagatgtggcattgttaattccttaaatttaggttccaaaagaactagaaggacagatcacttgaacttcaaacaaatacaatcaaagtctattggctcatgtccacagatttggtgtccttgggtgtgggcatccttgttagctaaaatataatgttgtgatgtttcaaagatcatcatagagatcatgtatgtagtacatataaagttaagtatagtggcaacagttcagtttggaattcatcctagatgccgaagaagcaaaatagacaagcagtcaacctgacactattcatcatgtgctgacagtgacacttgtcttcttcttcttttttttaatctcagcatcaaagttgaaatgtaaactgaattgttatggctacatataacttttgtgatgactttttgaaacattgtaacatgatattttagctaaagagaaccctcacaccccaggatgccaaaacattggtttaatggtaaatataattccgaaaagatcatattactgattctctactattatcatttggtcagagctatgcatacaagtggtggcggccaggtggcaaattgtttatcaagattgctagagcagttaaatttactcctattatcttctggggtagatttgggtaacttcacccctcttagcattcttttcttttccttccagacttctgttcaatagattttttgaaacactgttttctgggattagagaaattttcatggtctactggcatttcaatgcagcacaccattccccttcccaagacccatgcatgtggtcgtgggtaaacctattgaagtcaataagaatccccagcccacgattgatgaggtagctttctgtccttaatcaaaaccactttttgaagagaaacattttgtaggctcaaattgttctcatgctgcaccaatcttggatttggtccaattgtccaaagtccaaacatagacaaacctaattataagtatatccatgaatttgaggtattgaaggaaataaaactcttgtgcttgcataagaatgccaatatgtttcctatcttattgtaatgaaaagcttgctttgatattgacctgttcaagtttctgaaaaggagcacaaaaaaggagtgaacactctaattatactcggtgcctgggttatatgggaacataggaatgcttgtatgtttgagggggcttctccttcggttaacacaattttgtgtgagctgaaggatgagcacagtctatggtgcatggccagtgtgaagaaactgcatgggctaggtctacgtttcaacgtttgcaacctaggacagttgggctagtccgagtcgtgtttgtttgctatgtgtaagaatattgagtctgtgtaatagcttcactcatatttggtccgtgtatgagtgaggatcatgttggggaccaccccaattctctaatacaatgaaacacagatctccaggcgtttcaaaaagaagtttctgaactcttgttcctggtgctgacagattaatgaagtgcatgaacagttcatcattgccctgcgggacctgtttgagaagtataaggggaaagctggatatcctggccttcatctaagagtcctatgacattccagcaccagactcaaagttaggattcagcaataacatggctctattgctcctccctcaactgaagtgtcaaactgcacttcgcaggcactcaggcagtagttgcgacattgtggtgatgataataaggctccagctctgatgccaaaacatgcacgagttgctcacgattcagagcccttgctttactttttttttactgttgcttgcttaactttggtggctgaaatgggtatgcaaagataggtaatttaaatactggttatgcgatgttgcatatgagaatatgaacattggtgagatataagctcctgtatttgcagctgtgtcatcagtgtatgaatcactaggaagttgctgatattgggcagcctgtgtacctgcagttgtgtcattgtctgaaaaactttcagatatattagaacccctacaagcccatttggtttattatatttttgtccctttttctgggcttattgtcaccggggcatatatttgacaattgaaactgtcctttccgtctagtgatggccctttccaacataaagatggaaaataaaaatggatatctaaattatccaacactcgtatcctcaaacttataatatggatattcggatttgtatttgtttctaacgtggatactaaatagatgtatataaattcgttttttagtaattttcactacctcaaatttatattcgacatttatctgtatccacgaagaataagataccggttgaattactattgcaccaagccgaatatgaaactcttttattcggcttggagatattgtattttatttaggtaaaacatgtgagtcctatggtgattccttgttggtggtacaataagtaactggtgaatttcaatgtagagggatcactcgatacttatcttgatatgtgccttgatataattacttattttgccaaattctaaa

SEQ ID NO: 5050 - DNA, 4335 bp, Sorghum bicolor
attgtgtcttgttatacattagcattttccataattgaatgtgacttaaaatattgaaaaatatcgttattttgttatttttaattacaccctaaaataaaaccgtagcgtgcccacgggcactatactagtctttaactaggttaatgcccgtacgttgttacgggttttaaaatccaaatactctatgtttcttgattgatattttattttttctgtctatattcttccttttccatttatttttcagttttcattttttgattttattttatttcatgttcttttcttattttaattttaccttttattttctttttcttttggttttagttttatcgttttccttctatttgtttttcttttttctttttcagtttcaggttttctaagtttcttcattcttattttatattttaatttcttttaatcttctttttatctttatttaaattatttatttattttatttgctctatgcactttttatcatttgttaatcatgtttgtttttattttttttcttcttagtaattttattttttatttttattttctatatatatatgtgatgtttggatatatttagtgttctatgttgtgttaaaagatgttctatgatgtttcttatggtgttcactcagtatacatgtaatctataatagatgtgatgttctataatatatttaatgatgttctatgatgtatttagtgatgttaatattctataaatatatttacgatatttgaaaagtaaccctttgacattatttaaatttttctctattttgtgtttttatttttttcttatgctttttactctagattttcttattagttttatctatgtcatgtatttatctatgtatattgtaatatcagtttcataaacctaaaaccaaaatactattgttctaaatcaatattatttttttacaaagacagaacattgtctgtcgaacctagaatattgtctctacttaataaaataaaatattttatctttataagataaatattcattattaaaattttatctaaatatatccatgtatgatcttgttttgaaggatttgttataagaaatttaatggtgcaatcggaatttaatttatatctttggtttatgagttatgactttttttaattcgctaaaacaattttgcatgcataggtgagtggggcttaggttgatgggatagcgtgtcatcgcgcagtaaaaaagaccacgaaagggatgagagttgtggacgcgtcctctccataatttttagttgtagagataaatattcattaataaaattttatctaaatatattcatgtgtgatcttgctttaaagaatttgttataagaaatttaatggtgcaatcaaaatttaatttatatcttcggtttaagagttataatttttttaattcgctaaaatatttttgcatgcatgagtgagtggggcctatgtcgataagataacctatcatgacatagtaaaagaaaagttgtgacttcaccatgaatgtggtagatgagtctactcggtttcttgttgtagagataacgagggaaaaggcttgctccaaatccgggattcagatggcaatagggccttgtttagttcaaaatttttttggaaaatcgacaccgtaacattttcgtttatttgtggtaaatattgtccaattatagattaactaggtttaaaagattcatctcgtcaatttcgactaaactgtataattaatttttattttcgtctatatttaatactccatgcatacgtctaaagattcgatgtgacgagaatatggaaaattttgaaaattttttggggaactaaacaaggctagcactgctcgcccgttcggttctgcaaccgcagtgtgttcttgggaatttgggatggcgctggctagggtttcaccgtcttccttagccggccatcgctcccccctgctccaatccttcttccgccctttctcctcggactttcccctccgcagttcccgccgaagaagctctcccattgctgccgccttctccctggcttcacaatctgcccacgctgcgagggaggggcaggtcatggaggcgcccaggccgagctccaggcgtccttggaagcccacgtgcttgtactacacccagggcaagtgcacaatggtgagattgcttccctccttgcaatggtggtcgcttttggccgtgttggaaacggagtggttcctattatatatcttggattctattagtttagtgcagatatattctactgttgacatttagatgcctaatgttagctaatagagctaagatggatagaagttgatgctggaaggagagttaatattagtagggggatccttgttctgaagaagcaattgggtttaggtctaagcattttaaattaacaatagcactaaacaacagaatagtgaggaaattctgttaaaagcaaatgaagcgtagctgaaccagcattggtggagttacaccccaattttgttttagttggtaatcataatgtgctgagcagcatgtgcgattactggaattagctgttgctctagttttaatcagaggtgcataggatgctagccaaggaagtattttttgtcaattgagttgctattataatgtgtttttgtatgatataatggtcactaaaagagttatatggagtgctgacaatgttaagtgcctttttttatttaagtaaatcaaaatgcaacattcagatcaatgaattcttgtactgtaggaatcttgtaccgtaggaattcaccgagaaagaataatctgctcactctttaaatgtccacaaaaataaaagtacaagcttctttgatgcttcatatgaattgctaacgagtcagatagatttgttactctttgttctacgagcccaacttatcgactaacatttagattaaactttgggcaatatcgaacaaccttggtgacaataagaatgtataatcatgtatggggctcaagcttaacaacaggcagatgaggacaaagatatgagccatccgaaaattacagtgacggaaccatcgagaagtttgcatgctgacttggaaaaaggtagaattcaccatggtgaggaacagtgagaaacattactgctcaaccgtataaaagaaaacattacatggcttagcctttttttatatagacaagaagatgccccgtgaccatgattttggatatacaagcaactccagcagggcccctatttaggctcccatactacttttagcaccaagagggcagaaacctactgtaggtcttcagcatgaccttggccccccccaaagtagcatgccctcaaaatcatcctgcaagccctcattcctggctctggaggagacccctacttttcagtttgtggcctttcatctccctcctgttcgccgctgtcgttgccgcctcagtcagtccctgctggctagattcgccccattggcccccggccgccctcctgataggttctccagtcctcaggcaccctcttgcccgagcacctcccattgcttgcccctccctccggctgcctccaatgtccatgcggccataactgtttgtgttagccaccactgccgtgcttcctcccctgatcgactacacattctcctccgactgcctccactgcccgcagttcctccttggctgcctccactgacaaatagcccttcctcgttgcctagggcccttgccttgaggtcctccccccactgagcctgctgaacgagaacctgtgcggggacatcagcatgacaccatggccacggggctccaggcagcatgcagtagggataggagcaggggaataagagatgggagaaaaaaataaaaaagagtaagagctatgtgactgaaggtgcgttccagaaaagtaggggtgccgcagggacaggagcaggggaataagagatgggagaaaaaaataaaaaataataagagctatgtgactgacaggtgtgtcccagaaaagtaggtaccctgatttgtttatagagtttagactagaaaactgggcacccaaaagtagaggaagcctctaaattaaaagtaggggccctgatttaggggctattactatagttgctcttaaccacggagggaaccaaaagtttcttgtctaatgggttttgagtttcagcaggactgaagacttctttaaaaacagtcaacattatttataggcttatcaatctcttgttattttcaaaccacatggctgcatttatgattatgccatgaaaattatttcctacctgtattttctatatttcttttatggaactaaaagcttgttgtactgacagaaata

SEQ ID NO: 5051 - DNA, 2932 bp, Sorghum bicolor
aatttggtcggaattgacgagatgaatcttttaagcttagttagtctataattggataatatttgtcaaatacaaacgaaaatgttaccatttatattttgcaaaattttttggaagtaaacaacgccctggtaataaaaatatatcctcagctcatatcacatccccgtcgctgtctcctaggtcacgtaatccgaacggacagcccccgttgctgtcgaggtcaatgagcgtggcaggccttctttacatgcatccaaaattctaaaaatttgaatctgatgacacatacataaaatattaaatatagataaaaaataattaattacataatttacctgtaaatcacgagacgaatattttaaacttagctagtttatgtggacaatgtttgtcaaatataaaagaaagtgttatagtttcaaaatcaaaaaaaggcctaatagtcgagaaagaaaggcaaattaacgacccgttcctccgacgatatactctggttacaaggtgtaaatttttagagtatcacctcagatatcacgtaaaatgtcatatgagatgtttagatactaataaaaaattataaatttattaagtctaattaatctataagtagcacatatgttactgtagcactttattgtcaaatcatatactctatcccaaattataagacgtttgatttctttttatctcaagtttgatcactcgtcttattcaaaatatttataaaaaaatagttgaatttaagttattgttcaagaacttttattaataaatcaagccacgatattttgcacaaaatttaaataagacaagtggtcaaattttgtgttaaaaaaagtcaaaaatcttgtactttgagatggattgagtactaaataggctgaaagatttgtctcgcaaagtagttacattctatgcaattaattattttttaatatatatttagtactctatatgtatcttaatattcggtagataaagcgtaaattttgttaggaggaactaaacaagaccaagtaaattacaagacaaacgctgacaaacaaaggatatatacacatatatgtacacgtacgtaaagacgaggtgaaaaagaaggcgatgaggatgcgaatgcatgggaaatccctttacatgttgcgtggtttcgactgcagaaactaaagatggacggctttgccacctgctttggagcagcggcatgtgcgtacgtttatcccccggccaaaaagcccggcctggagagccactggatttgctgcctcattgccaaagcgaaaaaggagatgctagaaaatactgaatgcccatccatgcatgacctagcatccattattattaccttcttttgtcttctttttctgcaggccggccgggtacgtagcattcgcgttaagttggcgggaaagaaatatattcgtgaaagcgatgatgcacactgttggccggagattaagcctactcgacggcacggccacggaaggacagcccatcactttttctgtagctgacaagtggcacgcatggctgctgacgcggagcttacctgttggtcaatgtttctgtcacatatcatcagtgagcattcagtttggcacatgaatgaacttgagggcaccagattaaaagttggacggtcgcatgttcaggttactaaattaataatgcgccaggtacgagtagccatcagcttaccggtaaagcaaatccttctcttgcagactaatgcaaaaacatctccgtgccatgcccatcacacagaggaagaaatcttttgtttttcttctcttcttctaaacgacagaggaacgagatggcgacggggccatatctggtggtctggtggtttccaagcccatatatacaccccagcttatggcgttggtactgactcaatcagggagccttcatccgcacacagcataccaccacaccaccaggctactaccataccatcatcccatcgcagccatcggcgatcgacgacggcaggacagatggaccggaggatatccaaggaggacggcgaggcggtgaagccgacgaggagcttccgctacgaggactacagcaccaggcgtgtgttcctgcgcagctacccgctgcagtgggactggtcgcccgcgcaggacgacgacgacgacgacgacaaggacggcctgagccacgcggaggctgcggccgggaacagggcggatcatgccgacggcgacgagtgctgcggcggcgccggcagcaggcggtggaagaggcaggtggtggcggccgtgaccgagtggggggaagacaagctgctgctgctccggagggccaagaagcgcctggcgctctacctgatcggctgccacaaccacggccatggccgccgcgcgctgcccttcccgtcggccggcggatcctgcaccgtcgccatgctcacctccagatgatccatccatcaccgtgcacgcacggcatgcatcatgcaatgtgttgtgtggtcgatgatcaatccattggtccgtccacgtcttcgtatctttgtatagtatatactactctgttgattggcggcttcgtgctctctgaaatgaattgaaaatgcaatgtactcatgctaccaaaaacttgattatatacataccactagtaaatagggtctgtagagcagagctactaaattaataatttttctccgatagttcttcaagaaaaagtttgcacatgtcttaaagcaactaaatactaattaaatcaatcatgattttaggccttgtttagatccaaagagtttttagattttaacactgtagcactttcatttttatttcacaaatattgtccaattatggagtaactaggtaaattgtacaattagtttttgttttcacctatatttaatgctcaatgcatgtgccacaagattcgatgtgatgtgaaattttaaatt

SEQ ID NO: 5052 - DNA, 2944 bp, Sorghum bicolor
gttggaatatgctttttacaccgacatccaccatatattctcttattttcctatttaatccctaaaaacatagatataccaaaacctgtggaattctgttagataactccctattctatgttgatatttattatattcatccttttcttgtttggctgacggtttataattgagttagtgactgtcaacactggtctactgaacttgggttttaggaatttctaacttgaaaactctcggtttggccttaagaatgagatggatttggttgcaaaaaaatagagcgaaaccatccttgggctgatccccgagtgcatgttcctgatcaggtgaagccttcttcatggtggctactatttctgaagttggtaatggtgaacacaccctattttggatagacaggtggttgcatggtcaatgtatcatagaattggctccacaactttttgtcgttcccaaaagaagaaccaagcatcgtacagtacaaagaagctctcactaattggccttggattgcggacatacaaggagcccaaactattggtgtattggttgactgtcttcatctatgggacatcctttcagttctacaaccagaaagggaggacagacttatttggagactatcttctaatggatagtatttagccaagtctcgatatgagagcttcttcttgcgctcgaccatctttgctccatgggagaaaatctggaagtcctgggcaccacctaaatgtcggttcttcatgtggcttgctgcgcacaataagtgctagacagaagatcgacttgcacactatgggctaccccacccagagtgttgtccactttgtgatcaagatgtgaaaccgtcaaccatgtcctagtcggttgtgtctttgctatggattttttgtttcttttgctaagacaggtcggccttcaggcctatatccacaaccttcagaaaactcctttctcgattgatgggacagagatagtagtgctacttttgaattggtgagacaaggtgttaattccttaatcattcttggagcctggattctttggaatcatcgtaattgctgtgttttttatgggttggttccaagtgttgttggggctttaatcttagctggagcggagtgtcggctgtggatctcgacaggggctcgaggattatccctcttgtatgcccccctccctagtgattagtccttggggatgtttggtgttgttagggtcggcctccagttatttcctgaggcgtgttaggctatgactaagtggtgttgagtttgtgttggtgtattgggtgtttggtgtatttgttactaggttcttacaccctcctccttcttaatatattgagacacggatctcctacgttttttgagaaaaaagtaaattagtggcccccaaagtatattccattttctagtagtgtttggtgaaattttgcgtagtttgacttaggacaaattgagatccttatttttaggacaaagggagtagtaagaacttattcagaaatttaatcatttactaaagaaggtttaagtttgctacttcatttccttaatgttgatttcacgttaaatgttctttgtgttgtatacactctgtctataaggatgcaatagacacatacaaattcagttgcagtagtctcttaatccacctcagctagtcctaatgatgccaccaatttactttagcaagagcaaaattaaaccaatctgatgtggctgtcacattataaataaactcatcatgctttactaagtaccttttcgtattaatccgaaaatagttaaggaagtccccaaatttgaccaaatgccaagtcatccagcttatccagcattcaactttcagttctgcaagtgccagaaattgtttttcatctacatggtcttagtgaactgcagccatctataaatagggcctagatcaatagcagtccatcgccctcacaaacgcatatctactattctcttggaagcaaggaaaccaccgccatggcagccaagatgtttgcattgtttgcactcctagctctttgtgcaagcgccacaagtgcgacccatattccagggcacttgccactagtgatgccattgggtaccatgaacccatgcacgcagtactgcatgatgcaacagaggtttgccagattgttagcgtggccaatcccgatgctacagcaactgttggccttaccgcttcagccggcgtatcagacgccaatgatgatgccgaacatgatgccaccaatgatgatgaggccgacgatgatgccaccaatgacgatgatgccgagcatgatgtcattgccacaatgtcactgtgatgccatctcccagattatgcagcaacagcagttaccattcatgttcaacccaacagccatggcgatcccacccatgttcttacagcaacccttcgttagttctgcattctagatagaaatatttgtgttgtgtactgaataataaagttgacatgccatcgcatgtgactcattattaggaataaaacaagccaataaattgcttttcccttattatatctctctgtgtgtttgcaaagcctgttatcatttactgttatgaatcggaactctagttttcaagatacatactctctccgtcctgtaacataatttattctagcatttaaattttgttctcaaatataatacatttaagaggacaaaaacgagtttgcattaaatatttttgatttaccaaccaatcactattaatcacgttgataatagcgtccaattatagaaaataaaataaggatacatgtgtcttttatgttctcttttaatttattttaaaattcctatgatgcaatatattataggacaaagggagtttttttatcatgtctagacatcacgtatgtatctaggtgtgtaagctacatacttagaaaaacaagagtaacttagtac

SEQ ID NO: 5053 - DNA, 5204 bp, Sorghum bicolor
catgcacaatcatcaccaaagtacccggtaacaagacgactcgaagccacgccggtacggaggcctcgagtaggtcagcgcaccacgctcctatcggcccttattttattacctctaccatgtaacctaggtctccccttggaactataaaaggggaggccaggggagagtataagaagaacactacacgtagaacaaccatccatacatcaccattctcagcgacactcgcctgtattcacccctgtacaagcacttaggtgcgagataatagaaaagcatccccccgctggacgtagggtcttctcttgtccgaaccaggataaatctctgtgtctttctcgcatcaccatctgggagagggaacacacatacaagtttactcgttggtgtgaccccccgggggtaaaacaccgacaggcataatattaattacaggccccccatcgatgagtattttagagactagctgcccatcaaccttgcctttaaaaaacagagctttgagatgttgcctttcatcatcggatggtttctcaaatacagccatcatcgggtcaagcgctaattgagctatttgatcagagagactaatctcctcatcatcactggaaggcgcaagaaattccatcagcaacatgaataccatattgacatctgccgatggacctttccccctgcggtccgactactaccgatcttcagatttagaagaattttcttctctatgcaaatcttcttgatgttcctgttgcattcttctcctatgcgtccttgttaaaccctctggacaccatcgaggaagctttgtcttccaaaccggttgatagcaaacttcttttgattccacacgatggatgttaggatctctacagaatatgaattcatcggggactcgtgcatttgccatttcctctagttcttcttgattccttggaaagtaaccgatccgtccaccaaatctttcatgcacattaagcctgcccccagccgatcatgaactgatgttcttcctctgaccggcccattgacacgtcgattatcgatctggaatctctgatttgaccgatcgtgcggagacggggaggatggatatgtggcaacagcatagtagccgctggcggggaggatggatatgtggcagcagcatagcagccgctggccagacgcgtggtgctgtggaggctgctattgctgtgccgctggccaagacaggagccggcggacgggtgggataaagacccgccgggagagtggtgggggcaagcagggaggacgagcaagaagggcgtgaccacaactaacctcgacggcggatcgacggatcagtgcggccaaaaagaggataattttttgctgtaggtgtgtggtggcgtggtgctgaagctcccgtgcgtcattggaatttgtttttttacgggccttaccagaactagcccaaataatcacctgtttagagatagtttttttggtgagctagttaaaaaaaagctttaacactcctgtttgactactctatttgactacttttgagctagggccgtgtttagttcgtgaaggaaaaaatatcgtgatactgtaacattttgtttgtttgtgattattgttcaaccatggagtaagggcactcacaatgcagactctatcatagagtctaaagttatttattacctcgaacgatgtggacttagagtctaaataagacttggagtcttattttttctacatctttcttcaataaatatactgtcacatcagcaaaataccataaatagtatgtaattaattgtcttagactctgtaatagagtcttgcattgtgagtgccctaactagacttaaagattcgtctcgtaaattctgaccaaactatacaattagtttttattttcgtctatatttaatactctatgcatatatctaaagattcgacgtcatggaaatcttcaaaaattttgagactaaattagcacaaactaactctaccgtgatccggccattctctcctccctaagaggcgaagcggcgccccgggtgaatgccgatggccgcggcttcgccggagaagctccactgcggcgaggtggggaccggtgacgaagaaaaggaggacgcggagagggctgatgccgaggtgatagcgcagcaactgtcgaatcaatcgctgcgggagaaggcacagcgcctccagggcctgctcaccgaaggcacgtccgaacgcctccctgaccgcggtaggaagctgcgcgccacactcgttgccatctaccgggagcaagaccgccgccaggcccgaggcgacagggcacgagcgccggtgagtcgctcttattcctccctgtttctgtcttcgtgggcggaggtattaagagtagaggttctattttatgggtgctccaagctggtgtagaaaactttgtgcgggatgaattgggggaggaggtggagagttgtgcttcagttcaaggtcctattcaacgaaatgcctgcaagccgtttgaagtctaagcagaattgacgcaaagatgctatgcaatcttggacgtgcacaaagaatctgaaatcaaaattagagcttgctagagtatttgatcaatttgtcttactgtctggtaatgcctagcatatgtagctgaaattgtgcccagcagatgctatggataattgtacaatacagtaaaggtttggtaagtaaatttgcgtgcctggtaagccttgttctggaattttttcttgcagggcaatgaagcatgtgaaaggagagtccgatcgaggtgtattgaatcatcgggtacgttactgatgcaatgtcattttagcaactttctagacttgggagtttcaaaataccaacttgtagaaattcattgttcataacatgattacatactctcaaatagtaaaatgcacggttacatactttcatgtttgcatttacggatattcagtgtattatcgatattgaatgaatgatgattatcctttctatgcttttcacattctacagttaatgatgttgtttattgcagttccagtgttgtctgtttatgttagtttggggctttataatttttttctcactattttatttgtaactatcactctactctattttctgtaacttctttagtgcatcttttcatgtgcatttctttccttaatataatatatggctttcttgttcttaaccctttaaataaaacataaacactgtagtttcacaaaactaacatggaaaatgcaattcaagtttgcatagctcaaatgaaataataaagttttcattgagggctctcttgtacttgagggacttgtttttttttctcgaatacgcaggagagctgcatatcattgtattagtagaagaaaaaggagtcctacatagacccaaacacactcacacacaaaccaccaaaacttccctgatttctaaggctacctcacagaaactgagagaagaacgacctagtgggctaagagactaaaggcccctagcagtgagcaaggacaaacccttagctcctgccaaacaccaccagtggacgtcatccctagctaaactaagggcagtgttgatgtttggaacaaccccattgaaaacgcagtcattccggtgtttccagatgttccaggcgccaaggatgacaatggaatttaagccctttctcacatccccgaaggtagctgcctccaccttttcccaccagtcatcccaaactgaatcctcaggctgaggcgtgagggaagacagtccaacttgctgcaagagatagaaccagaattgcctagcaaaaacacacccaattaggaggtgctgaatgctttcctgttcttgatattcatcttttggttaattgactaacttttctcttcaacgtttgatgtaactgaataatcctgacattgtaagattttttatatagcttttcaatgattgaatctagaaggttagaaattgttaaaataactgggttaaagcaaatgaataccgaaagctatatgatagccgaaactatgttgtaaaagaaaaaaaaaatatgcgctttcaattacaacgaattcgtatctgtgaagttagacattgacacttttgactcactgttatggccatgtgactagatccaatgaagataaattatcgccagtgtatggaccaagtatgaaaaaaatctgaatgttgtgtgtgcttttatcttttccaccacccacaaatccaactacttgttgaagtgtggaaggttgaaaagcagtatactgattgagttttgagcagtttggataacattgttttttgggctgaccaagttgtttataccgtctgtataccgtttgcccctttctttctatatgcttgttttttcatgcttgatttctttgttgttcagatatgcatttcctaacttcttgtaggtttgcgtagtgacctcagtagagttgaagtatcagtggctgatttcatgtcttcatttggagcggataaagaggtgaatatcttattgtgtcacttaaatatatttcttttcctgtgcaaatgtttatgttatgtacattaggcaggcatcaacatatctagtttgggaataaaaagttggagcccaaaccagcctagcactttgataggaaacaaggggaagttatgtgaagagaaagactcttgtgaagcctctttacaaccaatgaattcagttcatgaagagtggcatctggacacctcagagaacatggggaagacatcttctggtgatgcctctaacagcaatgtccacaatatattgtgggaagaggttcccagaccctctcgtaaaaggttggtattcatatgctcttgtgtcaactttctaacgatgaacatttttttctcattttttgagttttggaatttcatttaattaagtaacattgcatagtaaaaaaaatctgcatattcgctttattattgcatgatgatattatgataagacaagttttcaggcttcccacctgattgcttaaagaagatgcaagatgcacactaccttatttacacattttcagtaagtataaataggtctgactagtggaaccaagaaacacgttttcaaaattaactagaagtaatcaaggaatataattgctttagttttttttttttgcatatttagataaatgaaatataaaatatatgttctgcatctatacgattaattgttaattgtattgcacata

SEQ ID NO: 5054 - DNA, 8171 bp, Sorghum bicolor
gtcggctatatatcctaaacccggtcaatcacttctctactcatcttagaccggcaaaagtaaaaccctatgtttatacatttgccttgttaacttttgctcctcatctatcatcatgatcttcacttcatgcttcatccctctgtgatcatgtgaccacctttttaagccagcatgcaccttcatcacatgtgttgttatgcctaactcaaatcacttaaacacaagacattagcaacttggtgtcgttaattaccaaaactaaacttgggctttcattaggttaatctatgatcctactttttaggctttttaaggttaaggaaattcatttaatgggtatagaaaaacaatagttagactaataaaaaataatctaaattaatttagtataaatattgatttgatggttataacaaaaaaaggtaatatcattttgtttttttattttaactttgtgctccctttagtgttcggacaaaaaatttggtcgtatggcactacactaagtcataaatttccaaaaaaggagacattttttaaaaaataaatgaatattttttaaaaaaataaatttaggaaaatagtactttggggccatttagttggtgaattttttttgtaaagtactactgtagcattttcatttgtatttaataattattatctaaccatgaattaactagactcaaaagattcgtcgcgcagaatacagacgaattatacaattaagtatttttttatttatatttaatgctctatatgtatgtcgcaagattcgatgtggcgagaatttttaaaaaaattatgaaatttctaagaactaaatagccttgtcagatccaaaacaatttgctactttagactgtctccaacaggagacctattgcggaacccaaatctaaagtgagtcttcaacataatatttatagctatttgaatattaaaagagacataatccaaatttaggtatccttccttctcgagccttatttgcagattgttgtcttttaggtcttgttgttggaaaagactaaaaataggtatgaaatcatttacatgtagcgctaaccaaattaatcttgtattttaagtcacagttgttagagatagtcttaaaccgattggcaactactaattatgtggttccaaaccatcactaataaaatgaaatggaaggcattatttatattagtaatatttttatatatttagttaatataaattgagattgattgatcgctaaatgcgtgtgtttattttgttatctatagatgatcatccggcgtgctgtgtctgcatcgtgctgtgccatgccgtcgtgtcgtgccgtaccgtaccatcaccgtgcctcgtgtcaggggtacagcctaagccacggcccgtgggccatcagatcggcccaaatacatggcgtgccaagctcgtgcctgatgctgcagcaggccagcatgatggctagatgggccaacaacaggcctatattttcttttcttttttgagaattaacaaactatatttcttactaagctaattaggatagttcaatgagtcatcatgcttttttttaagaattagcaggctacattttttattagactattaaacactggactgttggactgtatccgagccgtaccacgagccacagtgacggcttaggcacggcctggtgccttgggccgtgccagcccgggtctcgtagctgtcgggctgtgccatgcccgtaccaggccaaaataccgggccacggactgggccagcgagccacgtgctgtatgattatatcggagcgagtatataagtgtataacgaagcagacccatgctcctcccgcctaagaaacccttcccgcgctttctcccgccaatttttttgcggcggcgggaacacagagataacgaaaaggtacaagccccaccttcttctcaatttctaacccatctgcccatcccatcccattccgaatccgcatcaccacaattaggggaagggccgccatgaaagggcgcgtggtgaagctccgtgaggcgcacaaggcaggctcgccggccctctgttccgcctcctggggccccagcgggcaacatgtcgtcaccgcttctgctgccgacactgccgtcctcatccacgacgccgccacggtgctcgccggcggccggggctcgggttcgtcgccgttggctactatccgtctccacaaagacggcgtcactgcactcgcagtcgcgccgggccccagcggctctctggcatcgggatccatggaccactccatcaagttctacaccttcccaggttcgtggatctcagcgccctgaggcgtttatatgattcgataaattttcttactttacacggccagatctgtgatatgtcttctgacctctgcaagcagagggggagttccagagcaatgtcgcccgattcaccctgccgattcgatcgctcgcctttaacaaaaaaggcaccctgctggcggccgcaggcgacgacgacggcatcaagctgatcgcgaccattgacaacaccatctcgaaggtgctcaagggacacaagggctccgtcactgggctggcgttcgacccgaagaacgattacctagcatccgtcgacagcttcggtaccgtcatctattgggatctttgcattggtggtgaggtccgtactttgacgcgtgttgctcccacatttcggtcggataactcggtcaggaatgttctgtgctggagccctgatggtcagacccttgctgtgcctgggttgaggaacaatgtggtgctgtatgatagggacacaggggaggaggtgtgcacactatatggagatcatgaacaaccagtgagcagcctttgctggtctcccaatgggagatatctggccagtgctggcctggataggcaggtgctcatctgggatgtgaagtcaaggcaggacatcgagaggcagaagtttgacgataggatatgcagcttggcttggaaaccaaatggaaatgctttacttctgattgatgtcatgggcagggttggcatttgggaatcagtcataccttcgactatgaagtcacctaacgagggcatacctgatctcaactctactaaggctcctctatttgacgatgatgacgaggacgaggacgaggagaagccaagtacctctggtggcttggaggatgatattgatgaaactcttagtgattcaacacctttcagccacaagagaccaaggaggaagtccacattcgacagagatagtgataatgaggatttaatacatcaaatggaatcgaccaaaagaatgaaagataagcataataaaaaagaggatgctggaaaggcaagaggtgattctgccacttcagcaaggctagttactgcaagaatgcaagctgctttccagcctggctcaacaccacctcagcctggcatgcgaaatttcctcgcttacaacatgcttggaagtattactactattgaaaatgagggacattcacatgtggaggtaagatctgctgctacatgttgctttgtagccatatgtgctcagttgattgcagcttgaatgtggatccagccacctgatggtatttcagttcctccttatgcagtgcaataactattgtacttacattttacaggttgacttccatgacacaggaagaggacctagagttccttccatgacagactattttggtttcacaatggctgcaatgaatggatcaggaagtgtgtttgcaaatcaatgcaagggtgacaagaatatgagcactctaatgtaccgcccttttggtagctgggctggtaacagtgaggtacgttatttgcatgtcacacttaggtaatacaagttcaacaaatgaaaaatcttcaagtttgtatttgttactatttattgatgcataatgtactttatattcaaaattagtggtcaatgagatttgagggggaagaagtgaaggctgtggctcttggtgctggatgggttgctgcagtcacaagcttaaattttttgcgcattttcaccgaaggaggcttgcaggttatattaagtttcctcacatctacaattgaaaccttctatatttgtctagttttattcttgtctgggacatagtgaagatccttttgcttagaggaagctgctgccattttagttcccagatacaaatgaactatgttatcaatttcatgttcacaacttcctatgtgtgctccctaaggccgaaatttttataggtattaaattgttgacaacatttttttataccactcttgattccctctcaaagaccacaatcaaaaggaaaggagaaacaaacacaaatttatgtccattgataatgcaagctgaggactatttatggtctgtgtggtattcaatgttctgtttttctttgaagaccaaaaaagaaaatacaactgctgtagactcttatagagaggacttttagtttagcagatgttgtcgcggtggcaaatggtaatagttgtctaaaataggggaaaagagaagtccaatcaatttaagagtttgagcaaggaagttgtatacgatatgatagaatccaagctcaagttgaggtccatgtactattagttttttgcgaatgcgccttcgcgcgctattcattaagaggagataaccgtggtcagaagtttgcaggtatgcattctaggaatgtgaggggcaccccccagaacgcaagctagcagcagtgcatagtaggatttagtcatatagactatctggagatgtgtaaaagatagacacaagtaatggagaatgttatggcagctgctggggtcgagagggagatagggggctggctgggggccttgcccacggcagagcaagagtgaaggtttttccttctaatttctgcttgattagattgatacatcttctctccttatatagagaggcttacttggcccctaagcaagaaattcttatctctaattaaccctaactctaatgggctatattgccgacccaggcctgataggcccatgacatacgcttctaacagagaaacacatctccatatttccagtttctatcgcccttcttatttctattttgtattgtcgctccacatctctaaacaatgtaatctgcttctgaatttgttagaagacagagcatggatctctccatggataccgtatctcttgtacaagacaaagcagaatcaaaacactaaccaaccaaattttttttggcagatgcatatcctctcagtcagtggcccggttgttacagcagcaggttatgaagaccagctagctattgtgtcacatgcttctgattgtctgccctcaggggatcaggtatttgtcaggattttaatttgctctagtgttaagcttaacagtgaccttatatacgttgtgccaaagctgctgtatagttttaagtagtgacctatccctttggtgttatgcatacttttctgtgagtaatgatgttgtaataactaaatatttgtgactgatactgacaggtgctggatgttaaagtattcaacatatctgaaggggcacaatcaatgtctggtcgtcttgttttgacaccattgtctcaattatcttggtttggattcagtgagaatggccaacttagttcatatgattccaaggtttgtatgacctacaagtatgttaatgtttaacatagcttcaatgataccaatatcaagaatgttttaaaagagcaaccaaattttcagggaatactgagggttttttccagtcagttcggtggaagttggcttccattatttaggtattgaatatactctactggataaatactcatgttattgctacagcaaagaaaatcactctatttgatttcagttcggtgaaggcaagaaaatccgaagatgaaagccattgggtggtcggtttggatgcaaataatatattctgcattgtatgcaaaacccctcaatcttatccacaggtatgatttgtttcttttcagttactttcatgttagtggaacttctgaagtgtagatagttccaacaaatgtttttttttctctgttcgaaactaggacaaagtttcctcactacaaaactgcttctgatcttaggtaatgcccaagcctgtgctaagcatacttcatctgtcatttccccttgcgtcatcagaccttggggctaatagtttggaaaatgagttcttgatgaggaagttacagctctcacaggttcatactgttccttttcagttctgtactgtgttatatgtgttctgttatctgtttattaaaattgctatttatctcagattcaaaataaaatggaagaaatgactgctttgggccttgacaccaccacatatgatgatgaagcattcaacatggaggcaggacttgaccaatgcattttgaggctcatctctatctgctgcagtggtaccagacttgaactaaaaggatttatgaattttggtgttgtatgaaatttatagtcttcttttcttgttttcccaaaggtgataagctcgttcgagcttctgagcttgcaaaattattgacactagagaagtcaatgaagggagcgctaacactagtgacccgcttgaaacttcccatgttgcaagagaagttcagctccataattgaggtaaaagccacaacccttaatttctacttcgattgaacctatctaatttctagacctgattcatgtgaactgtgcagaaacttttagccaggatcggtttcagcacaggcttgattcaactatgtaatcaatttgaccaacataccttcatgtaatctgatcttgtagaaacacgtcaagagtgtaccaatcacagaatatcttgtcgtcctcatgttccaccactaggcagttcgtacaaggttccatggctgcaaacctgtacaggagttccatcctcctagcggcagtcagggggccttgagctccacctgccctataattccaaatctcttaatctagcaaccaccatactaggaatttattattgaagttaatctataaattttatcagccacacttaatgtataaatctatgaattttatcaaccacacttaatgtaaaaaatattcttacagtcttgagcaccttgttcaattgatgattgtatagtttcctgtttcaggagaggatgttaaataataaaataatagctgggacaggaggattttgctccaatgctacaatcacgacgaatacaccagtgctgaccactcaggcaactgtaccttctaagtttatgcaagatgggaacagttcgctggaattttcgttacccaaaccgaatcttgtcaatcaacaatgcagttcaactgaaccaaagaagtcagcaggagaacaagggattgaaattaaggatagtgctcgaaaggtttcatctgcttttattccatctgccaaagtacctaaaagcagtgaaacaaagaaacatagaaatggagcatccaatgcagctgtagtcgaccagaatcaggaaggaggcattgatcatactggtgcaaaaaaaatgagcactgaatactgcaatcgagcagagcctcagcggccagttaacccttttgcaaaatcatcttccagcaaagaacagtcatcatcccttttggattccataaaaaaaatgaaagttgacaaacccaatggtagaatttgaaaaataattgttctcatttataccatggcccgtaggaagggaaccaactgttaggcatccactgacatctgcagtatctagtttgcttctgatggcatatgtaataaccattcactttctaaatttgtttcttgatgctttggtggattactgccgttgggatagatcaacattatgtgatgtattccccctgtttatgaaattggttcatttgtgatttgctttgtcatatactattacttctggtcttatcacctctaatgcttgtatgccttgcaggtatgtaaggcttcgtatcaaattgactcttgaacttttttttccccaacaataggtgttaattgagcctcttcacaatatatttttacacttagaacagccagtgtcatgacctgacggtgttccaattgagactagggatgaaaatgatacggacattttccgaatttgtttagaggaattcaaatctgtttgtattagtctagatatttaacactcaa

SEQ ID NO: 5055 - DNA, 5747 bp, Sorghum bicolor
ggtagggataatcccccatctcattctagtattagataacacgtcccatacagaattctcacagaaactaccacaacaatcctcacgaacatagtacggatgaacattaacggagccagaagcttttagaagcccgagcaaaatttattgtataaaaatatttaactagaaaattataaaaatctactttgatataaagaaaattttcttatgaacttgatgacgagcccggccggccgcccggggtggccgggcggtggctccgccagtgcgggtgaacacagaacctcacgctcatagtaatagcatttccgcttcagcttccttacatccaactttttctggatctaggcaaggatcctttctcctcagcctatagaaagaaaagaatctcagttcattagattatgcttccttgcccgtgtggaacatgtgtgagcattatgtttttccaacaagtgatccgactggaagaagtgttatatgaggacttcgagatcaaatagagaatctgtctctcctaattatatagtttgcttgtaatttgcgagatgaatcttttgagcctagttagttcatgattggacaataattatcaaatacaaacgaaagtgctatagtggataaagctaaaaaattccgcaaactaaacaaggccttagtagaatctgttggggtgagctgtctctctgtcctttagcttggccccacatgtcaatttgaaatggagataacccagctgctggttcagccctcctacagccactccacttcctgaccattctccctctcccctcaaaagaactcaagaacaaagaagaactcgagagaggaacaaagaaaaagagaagaaaaggaagagaaagaaaagaagatcatggagtaaccaagaatcatcatctcaaggaggaaatgcacataatcacctccatctccattcttggatgagctcaaaaatcccctctccattcttcttgaaatatccactcaaagcctaactcttgccttctccatgcatggatggaagatgaagttttctagatgctccattacctcaagtgtaaactcaatgtcctctcttcattagtcatctcatgcatctctccaatttctctctaatagaatttctatatgatttttgcaagaaaatcatgagaagggctccaatccatccttctcacttggaagcaaggaagagcaatacctaacatgatcttggtggcccaagggttatccaaatcttagagataagtttccatgccgaagtttatggatttttctctctttttctcatggttgaattaattcctaatcactactttcatcccttgattaggagctcaagctctagctttcacactcaacacctgacctaaacactcatagacaatctctacacatgtgtggaacttcaagaaggcagatgagaccgtcggctcaacagatcggatccttttttctcatctttcaactggaagagaagcttggagagagctggagaagcggcgtcgagaagtctgcgcgtgtggacgtagcaagttttttttttgcaagctagagatttttttgacaaatgcaagctagagttgaaaggccaaaactacagcagcagagcggcacacgcacatctgtcgcagtcaatttttttttttttttttttgcaagctagagttgttgttttttttttgtttgacaaatgcaagctagagttgaaaggccaaaagcccaaaactacagcagcaaagcggcacacgcacatctgatcgcagtcaacggtcaacccttgcacagcagagagcagactgggaggcaaacagatcaagtcaattcacagccgtccgcgcgatgatccgacggcccagatcggtcctgtccgatcccggaattcggtccccgtccggcgacgaaagcgcgcagatgagatcttcttcccctccggtttaggctagacctcgccggatgccggatcaccgccccaccccacccacaccccccatgcgatgaagtgccactctgtgtccgcgctctggtcgccgtcaccgccgtcacaccacgtcaccgccgccgccgcaaccccggccgcgctcttcaccggcgccgcagacggcaccgtcctccactggccactggcgcccgcctcagcttccccatccccgcgcccgtcttccctcctctgcgcccacgctgccgccatcacctccctctgcccactcccctcaccggcctcccttctcgccgcctgcaccgcgggagtgctctccctcttctccacctccgcacccctccgctgcctccgccgccgctccctcccgccctgggccggctcaccctccctcgtcgctccgctcccgtccatcacctcctcccaccctcgcgtcgcgatcctctgccacgcccctgatgacggccaccgtcacgtgtcagccctcgtggtcgtcgacgcgcgtaccctcgccgtcctctacaccgtcttccatgggatcctctcggtcgggactccgagggcgatcgcggttagtagcgccggtgatgatgcagtcagcgttgtgctggctgacgcgcagggtcgcgtgcaggtgatgcccgtggcagagggcgcggctgtagaagtggactcacccaggcgtctcagcgtgagctcggtgtccagcgtcgcgtctgcggagatggcggacgggagggtggaggccttggcattgtctaatgatgggaagcatgtggctttagtgctgaagaccagatgtttgttgaaatgcgtcactgagggggctgtgctcggggaggtctctctactgggtacatctctttgcaaggacgaaaacacagtagacaagttatgcactgctggagcttttttcctcagcggtgatgaatgggatgctcatgtttcggatgacggcgttgtggttaggaacttggtgttgtggagtagcaatggtgctgccacaatgtacagggttgctcttggtagctcatactttgagtctgaggtagtgtgtcaaattcctagcaacttatctatgcaaggagagggactggaaattaaattttgccggtcagaccggcatcttgttagggttgaatctcgcttttatatggtcgctgggtcattgttgtggaaaccaacagtcctccatatggttctattgggaatccagttagaactgaataaaacagtgaatacgcagaccaacctacctatgagtgccagaaaaaattggccatttggagaaggtatggaccctactccaagggccaggaagaatttaggccagagccctctcattctcaatacaataccaaccgagggttggaagtgatttcacagatgtgctcatcagaaagcagtatgttagaaaggtatggaaggacagtgtcttcgtcaatggtactttctgaggattcttatgctccatatgctgtagtgtatggtttccataatggtgacatagaagttatccgatttctgaacttgtcacctgctgctgcaaaatttggtggtggagggatttacccacatatttcagagaggttatttttggggcacaagagagcaattctttgcttggctgcacattacatgcatgcccactctgactctagaaacttccaccgagcactcatatcagggagtttagattgtacagttcgtgtctgggatctagatgctggcacccttctttctgtgatgcatcatcatgttggttcagttaagcaaatcatactaccacctccgtggacataccacccttgggatgactgcttcctttctgttggagaagatggccttgtggcacttgtttcacttcaaaccatgcgtgttgagaggatgtttcctggccatccgggttatgcatcattggtagcttgggagggagtaaaagggtacatagcttgtttatgcaagaatctccactcttgcaatgatgcaggtagcggattatatatttgggatctgaaaactggtgctcgagaacgtgttatcaatggcactgcttctcagtcagcgtttgagcacttctgcagtggtatatcaaaaaatgcagttactggcagcatcttaggaggaacaacttcagcatcttccttacttgttccaatttttaaagacacgagccaccttcggtctcatgcagataaaagtggtcatgatatttcatctgtgtcaaccaaccttcacaatggaagtacagtttccgtgactgtaaatgcacctacaacatatgattttaaggggaagacgccagctccagatgaagctcatgaattccatggagataattctggatacaattcaggaaaggctgtttcttcccacagtgttcataataaaaaaataaagtgcccaataaagtgctcttgcccctatcctggcattgcaagtctgagatttgacctcacggcaatcatgtcaacacaaggcatgacaaacatcaatagtgataggcagttgaaagatcatctccatagcgagaatcctaaagaaatattgcagcctggaacttcagatagtccttctcgtgttcatgaaatggatagcccctctagagagtcactggaagggcgtttacttcgatttagcctctgttttttgcatttatgggatgttgattgcgagctagacaaattgcttgtagacgagatgcaagtttggaagccagaaggctgccatatagcaactggggtggtaggagacagaggctcatttacattgatgttcccaggcaaagaagccacacttgaggtaaacttttgtggacagatcccatttcatatcaaagcacatgtgaagtctgatcatgttgtttttgcctgtttcagctttggaagtcttcagctgaattttgtgccatgaggtcactgtctatagtgtctcttgctcaacgcatgattacattatctcgttcttgtacaaatgctagcaggtattggttcatttgttccttctttcatattcatattcatttttctcaaaattctagattggcacccttttatttggtgtgctagagttgcagcaaaatttggcagaacaacctcaacacttttcaccatgacctgaaatatcgttgtttgtaacaagtttgggtaatcttaacctattatgcattccagtttagtctggaatttctaagttctggctgtttactaacttctataatttatagggtaaatctcatttacaaccctaagctattgtcaaagtctgattttttgaccatagagcaaaaccatactatgtgttaggttgtaactcctacaactgaacggtcaatatatgggataatagttgtcttaataaattaagaatattagtaacaaaagcaggatgcatgcataaaatggtggtgtggcagcattttaatttttcttattgtccactccctttgatccaaattataagacgttttggcttttctagatgcatttactatgtatctaaacatagtgtatctgtaagtgcatagcaaaagctatttatctataaaagccaaaacgtcttataatttggaatagagggagtgttaaacataagtgttgtttcagggcagggagcatttttttaggaaaaagtctacataaccccctcaactatacagggtggactacttcaccgcctgaactataaaaccagattttttaccccctgaattttccaaaaccaatcaaataaccccctcgagcggttttggacggtggttttgctaccgtgatggtggttttgtctttttattatttatttattt

SEQ ID NO: 5056 - DNA, 7210 bp, Sorghum bicolor
accgcaacactgtagggcttcttctacctctagctctagccaagccctaccatgtctgcggcggcctccctcttcctctccccacctgccattgatttcttctctaacaccagcgaacgcccgagacaaccccgccttgactttgcttagccccctccgccgctgtcagggcgcctaaatcgctctgccaccatgcccaccagtcagcccccctatctggttgcctctctctagttggctccttatatacccgacagagttgaaaaaaagaggaggagaggctcacaagaagcctagagtctttgtcttcggtggaagatgaggagaaggccgcctacctcatcacgggcgtgagcacgttgcctagcgtcgatcactagaggaagaagacgtcggctgtgagcatacgctacgccaaaagaaatcatagtgtggaaatcggcaaaacaacccattgttgtttacttcctttgtccacaaataaatgcacatcttgtataatgcatgtctatgcttttcgagaaatcaaactttttaaagcttgactagaaatatattaaatagtatcaatatttatatctacaaataagtatattatatgaaaatatatttcatactcgatctaatatatattacatatgataaatattagtatattttatatatatttagtcaaatttaaaaaagtttgacttgttaaaaaacgagatgcacatttatttgagtacggaggaagcagcttttctatatttttttactccaaaacaaaataataatgagtgttacacgtagcacatgctcatcacgctgcatgattctctattggaaaaagtctacataacctcccaaattatcaagggtggactacttcgccccccgaactataaaaccagatattctaccctctgaactttcaaaaccggtcaaataacctcctagagtggttttggatggtggttttgtctttttcttttttatttatttccgctaaatctttgaaaaatcataaaaaaatcataaaatgaaaatttcaattttgttggacttctgatgagtagatctacatagtgaatatataatatggtatactttagtataaagtttttgttgtagctttaaatctatatttttctgtaattaaatcgaataattcatatatgcagttcctatgatccaattatggtgaaatttttatggtgggctcattattgtatgcttgaactcgtaccattaccccgtcacttaaagatcacgtataacttagttatcaatttatttagctttattcttgttaaatctatgctttatttataactaagttatacgtgatccaatgagtatgaaatttttaccatagttcaagcatacaataatgagcccaccataaaacttttatcacaattggaccacaggaactgcatatatgaattattcaaattaattacagaaaaacataaatttaaagctacagcaaaaattttgtactaaagtataccatattatatattcactgtgtagatcaactcatcaagagtccaagaaaattaaaattttcattttatgatttattatgatttttcaaatatttagcaaaaataaataaaaaagaaaaagacaaaaccacccttcaaaaccactcgagggggttatttgaccggttttgaaagttcagatggtagaatatccggtttcatagttcagaggtaaagtagtccaccctagatagtttaagggttatgtagactttttccattctctattcttcctctcactagtcttcatcccggccccggccccggcccggcccagcttgtcagccttctcagttctcacacattcatcgcacacagattcccactgtacatagcgagacagcagaagcgaagctgagagagcagagcatgatggctctatagtcagacaagaaagaaaggcagtgcagggctgcaggggaagagggagccccgcccaagatcgcaaaggcaaagcggcacacatccatggaggtggagccaccaccagctgccgcggccgctgtaggagcagcccttctgaaatgccgcggcaacggtgccggcggggagccaacggtcgaggcctttggtaaggcggggtcgaggagcccgagccgcgcggccccgcggggacctccacaagaaccgaacggcacccccgggccaagtcaccgccgcggggaggaggaggaagaggagccgctgcggcgggggctcgcggcggctcaggcgcgggcacgggcgcggcggaaggcggggcacgccacgccgtcgccgtcctggaagctggaaccgtcgccgccgcggccggaggatgaggcgctggccgaggcggattcgggagcggggaggaggggcgcgccggccgcgtcggcgcggcagctgggcgccaccctgtgggagatccaagacgtcatccgggccgccggcgcgggccgacggatccggcgccgcgggcggagggcgcccaccgccgatgacgcgagtgcggatgcggatcgggtatgaactttgccatcggcgtcgcttttttccggtcaaacttgatgacgctagtggtcagcttgatgtcagtatgcgtgcatcatctaatgcttctcttcccaccttttttttgtgggtttcttggatcacgtcgctcgatcttgcgtcaaatcactcaaataacgctgccttttggtccctaataaaaaaaaaacttcggtggattagcagctattatatgcttgttccctcgtgtggttagctgttttcagttcttttcagtgttgctaaatattacatgcctttctgtgacaaactgacagcatcagatagaatacaagagtgagttatggagcatctgtgtatatcctcttcggttcttttatcagaaacagttcgatactcatagtctaccactaagcactttgtgattcgattatagttactgttaagtcttggttgtaagttgcataattttttttaagagaattaactctgcttctaagaaagcaacaggcaacaaagtttgctggggataccagccacattacaggtccatgctagatagaactagccatttcactactacaagaagaactgcataattttcctttttttaaaaaaaaaatatttcttctccacctactttagttgaattttcagagcgagcaagtaaatgcagccataaaagctgaatccaagtttttgtgatagtgttgtctgcacgacccttgcaattgagtatttgctggtactcgtttgacttatgatgtactggatatatcatatatggtggatctgtaggtggccactgtacaatactgttgttattccggccttttgttgcgtggggtgatgcaccgtgattttctgttgagcagtaacagctatacaattattttgtggtagtggatgggattcttggtgtagtttgtggtagtggtacggatacctcatttggtttgaagtgcttaagtgtagtttgctgatccaagcatagatccgaagtccagttatattagaacatcactgttttttttatttagggtgtccaaattgataagctataagcgaaacacaaagaatattaaaattagtgctgcatgaacatctaatatggactaaagatgagcctaagttcggcgcacttgcatgtattgtgagcttcagtgtggtggactgagcttcagtgtcaacatgtacatggaattagaattagaattatatactagatgattgtgagttcatttctttttaatgtttatgacattttccatcctaaggcctaaggcatactcgtatctttgtctcgttttgtatgctttaatttcttcatttgtggtttctcctaatatagcttctgtttaccgagctacctatttctttctgtaggaatcaccaaactacattgtgttcttgagtatttagcatgcttgtacttgatatttttgttcagttatttattcacgagagctttttgttcagttatttatccacgagagcatggagaaaccttgcctcggttagggacagtgaagtggtaaagaaagtgtatatcaggcggtggttgcaactttttaaagtatgtaactggtagttgtgaaaaaaaaaatcgcatagatcctaaaaacttgcaatatgcacttcattcttgtttaattgtttatgcatttgtttttctgtgaccaagtttcatgttcttaacgaagtagaggggccttggtttctgctcacaccatgcaacttgtaaggctcccctcaattccgttcactggcggagggctgtggaggccaagctgggtgctgcaccccctccatacactgtccactgaaatgtataaaagtagtgttagcttgttgaatgtaaactcaatctgacagattggccccgtcttggtttggcaccatgctctgccactgcctccatcatatcatttggaaacatagtttgtttcattcttttctgatttatcatgcattcttattgcacagcaggatgtacattttcagtttggtttatacttacaaaacacattataataatattccacagggaacaatgtaaacctctattttgaaggtgcatggtgatgcttttcgttgaatatggctaagatttgtgtcttttttttatttaatcctgtccccctttgttctgaatttgactttccttgggatcaatagtgtcaatcttgctttccactctggatatcacagcttgattttttgctgtttcacaaaggacatgcaaactgaatgtcataagtttcttcttacatttcagccacggagttcaggtggctttggagcacaaattgcagcttcagtcatcgagcatgagaagttacatgaagaaagatgtcactcaagacagcctctttctcctgcaagttacactagctctgttggggtatgtatgcattcactccctctacagacttcttggtttactttggtgttttacttacagcattagttagaaatggcagttctgctgacattcactccctcttctgtctcgctcttgtctatataagaagttatggactgtattatacttctccaaatgcaatatgtccattctatcatgatgtgcactgtttttatcgtgtcacacttgtgatgcattgcatattatcagttccgagttctgcagctcgaaacacttctgaattaatacatgtttctcaaaagcatccaatcatttgacaggcaaccacaataaaccttatcagccctactcggtcgttggattgcaatgccagatttaggcagccaggtaatgatattaaaacgtcaacagagctactgaaagttctcaatcgaatatggagcttggaagaacagcatgcagctgatgtgtcagcaatgaagggattgaaacgagagttgcatcatgcccaggcatgcattcaagaacttatgcaagagaggcagcggtatcatcacgaaattgattcactagccaggcaagtcactgaagacaaaatggctcgaaggagcaaggaccaagagaagatgagagcagcccttcggtccctgcaagaggaacttgaagatgagagacgtctaaggaaacattctgagactctccataggaagctaggcaaagagctatctgagatgaaatcagcattttgcaaggctgtgaaggctctggaaaaagagaagaagacaacctgcctgttggaagatctttgtgatgagtttgcgaaaggaatcagaaactatgaggaggaagtcaggttgttaaagcaaaagcatgtaaaggagtatgaacacaagtttgacaagtctgtagttcatatttcagaagcatggcttgatgagcgaatgcagatgcataagactaatatgcgggcagatttgtctgggaaaacctcaatcacagagcggctgagcagtgaaattgagggttttcttcatcatgctaaagggctaggttataccaagaatgataacttagacaatggtaatgaaaagcgtgatgcaagtttgtgccggcagtcccttgagtcggtccatctgaatggagccactagtgcccctcagctagctgaagatgatgatggtagttctattgccagtgacttacattgctttgaactgaacatgcatggaggtgccattaggaatcatgaccttgcaggaactcgaaggagggttacaggttgcatgcattcaccaatgcgaaggctggaatattccaatggcatatctgtcgaaggttcaccgatgtcaaatgcaccaccttgcccaaagaaagaaaagacaaggtctagcgttagcagacaacaatttatcacctcaacaccagaaattagctcacgcaatgatgctagccttgctcctgcagatgagcagaacgaaactgtcatgacccaagtctctaggcgattacgtgacgacctgttgaagatcaaatcagaggctcctcaacatgcctatctagggcaaaaatcaaaccagccccggacaaatcaatttcatgaatctacttcacgggatctttgtgatgtgcgcagtccagcacggcatctgaataacccagcccagtccttgggttacgagacatctgaacccccagctcatcagctcataggcacaaaggagaacactctgaaggcgaaactactgcaagcaaggctagaggggcagcacgctcgactgagcgcatcagtattccccttgatcagcacaagaaggaaatgatgtcactcctgagcttccatgatttcgatccgcaacttatatagttgcaattgtaagatatctgacttaatagctgaatattagctcgaggcaattggacttagtgttcggtgttcctgcacgccccaaattgcaggttatgtgaatcctagatccagctgatatggttttcgttgtagatttgatctgctaaccgtcagactagaatcgaatcgagatgggcatggtaatcatatcttgtaacttttgtacagtaataatttctagttattaatattttgctttagccatggccaatcttgtcccttttctcgaaacgaataatggtctgcatgtactgcaatttttcacccccagactgaggccttgtttacatccgaatttttttttggattttaacactgtagcactttcgtttttatttgacaaacattgtctaattatggagtaacaaagtttaaaagattcgtctggtgatttacaagtaactgtgcaattag

SEQ ID NO: 5057 - DNA, 8542 bp, Sorghum bicolor
atttttttatctcctcactgttagaatatctttgttttttaagatcaccttgtagactaaacccccagcctttgaagtactgtttcagtatcttcaatttttgctgaattttatctaggctggttctagctctacaaggtttagtccaaatactcctaacctttggaataaactcatgatgattcaaccagttcaaatcaaatttgaattcaatatgtctctgattaggaatagtttcagagaatagaatcaaaggattatgatcagagacctccataggtagttttttgactagaacattaggaaagatatcctcccaacctttggaaataaggattctatcaagcttttccaaagtaggattaacttgattatttgaccaagtgaatactcccccagacatctcaagctccctaagttcatgaaagttgataagggtattgaaaatatcagaatatctcaatgaaccaccaggcttattcctttctactgtaaatctgataatattaaaatccccaccaaccataaaatgttcctgatttctagtacagaaagctgaaagctcagttaaaaagtccattttatgctcttcctgagcagctccatatactatcagaatattccatttaatttttgccattttatcccacaaattcacctgcagcataaaattcccttgttggaatgaaccaacttcaaaccattccttcctaattcccacaaggatacctccagatttaccatgtgctgaattatacaaccacaaataatcctgattaggatcaaatttcttcaaatttttttcatcacaatctttaatcatagtttcctgaattcccaagaaatgaaaagcatattgatagatgagatctttcaagaaagtggtaacccctttttttctgaggcccctacaattccaaataagcccttgtattttttattatgattttttatgtattctggtattcctaggtacaggagcattacaaggcttcctttcctttttcttgatcaggccaggaacttcctggtcctgattaatcacatgctttaatggagagatttttaactttttcctattctctctcttctttttcctggactccaccaaaataagcccttgcattttcaatggttcttgttggaggcctaaattcatccggagtcgtcgaaaatcatcggaataatttgatgttcataatatatgtcagtgctgcgacgtcgtattttggtaggccttgtatcgagatggaatccattaggggtgtccaaggggtcttgcatgccataaatcagtagccgccgtctaagttagagtttgagttttatttaaattattttgtttataataattttgttgttaccgttagtttgtaagacctcaactttaattattcatctataaacttagttacaatttttcttattcttaattgtgttatgcgattcgtaggcaaacattagcctttttagcgagatcgtcgtgtagcgctggttaataatttaaagagacgtggtgctgtaattatgaaatttaaaatatattgttcggaaactggatcgaattgtgcctcagactcctccatatcctacttcacatcacgttcatcggtggtttttgcggagaagagaggacaacgacatgtatttaaaaaaatttacacgacagaaacacgagggaatgtgaggtcagcctgaagcaccgcctgagcccgcggaaatgcgtgtcgtggcgtggttgagccacctctgctctccccatagaaaaaaaaaaatactatacgagcaccagtgctgggtaggccatcattgcgtaaatttcttgccaacccgtgcgcacgcaaggctcctcctcctcgtctcgtcgtcgccgagcgagagacgaaagccgcagtccgcagagcagcggcggcagcgggaaaagctgcatgtccgagtcagagagatgccatggccccgtgacgagccaaattaaattcgcacccacctgacctccctccctccctcgctctctggctgcacttttccctcctcacctccaccacctccgggcaccagcccgcgctgctctctgcctctctcctgtccccggcttcagcagttcagctccttcacctacacaccacacggacgacctcctcgctgcggttgctccgtccggtggccaggccgcggttcttggcgctcttggttggtcggatcccttgataccagacggctctgcgtccacctttaacttcttgggggattcttgagcgtcaccttcctgtttgtttcttgggttgatgcggtcccggcggcggcaactgttcttatgactggaggggccaaggaggtggaacttttccgttgagggggagaaccgaaccgagggaatggaaggcgaggcggcggcggcggcggccgaggcggtggcgcggatacggctggtgcggtgccccaagtgcgacaagttcttaccggaactgcctgcctactccgtctacgtctgcggcggatgcggcgccaccctccaaggtgcggttctactctttcctgcaagctggcacaagatttggtttaaagccctgtatctccattgcccagcagtccagcatcccaaatggattttatcttggaatgactgacggctgcaagggagagatttaattttcgcaaacctatgctattgctttgcagcaaaattggggacacattactattgtttttagggtatgccagttagtttgacttcagagttcagacctcggttttcatcgttgttcccctgtttgtaattattaaaacaaaatcgtttcgggcctatttcatcctcatttcagaatgcgtggtaatgtttattccatttctagacagaatataaaacttctgaaaattttgaaagaaaatgcttactcttttctgttaacactaggaaatgtttacttttcttaggagcaaataaaaaatttcgatctttctgataaatgcttactctgttttttttagaacaaatgtaaacttctcctttttgaggaaaataattttacttcacttcttctgagctaatgtaatctcctggacctttcagggaatgtttactagtcctagtccacttcaggagcacatccaaacctttatttttccaagaaatccttactccatttttgtagggttaagtttgaacttctgtttcttgggaaatgtttgctccattgttagaagcaaattaaacttttcatttgcttttaggttaacttaggaacaaattgaatttcgattatgtttccaaattatgttctaaaattttttagtctcctttgaagagtatattaccatcctttggatttgaagtggaagaaccatgtctctgtttcttgcacacaaacaaagtaaagctgaaaatctagcttgtgccttggtgatagggacatggctctgtcctatttggttattattagtagcttttgttacttcttaaatttattgcattgggattaaaaaacatcagttgaatttgacctatatagtgtaaattacggtagttgattcagttatttgcatacccaatataccctgccatcagtgattaatttaggattctagctgcattctagtgatttagtccccagttgtacttttcaaggttgcttttgaggtcaatgaggagccagagtagtgcctttggcgccagtcttgcagaactagtcttctttggctcatcgttttgagctgtttgtttaatatcacaatatgacttggtagtcattagccttccttttttaatggctaattaagctttcataaagtgggacaataacatcttcctctgctaaaaaatttacagcaaagaagaagaattcagcccaatcgtcacatgacgctgacaatggaaatgtgaaataccttgaagtactggagcgtgttccagaggcatctgcaagaaaacatggagctagtactactgataggtcagaaaccagtaaaatggcagatgtacatatcaaacaagtttattatggccatcacgatagcattcagactgggccaagtccctcaaatctgaacgcttctattagagatgatggcaaggaggcaaagtaccgacacattcgttattgggagaatggtgaaatggggcaatcattgagagtaagagacatgtccccaaagtcaccagccaatgcttatcagggtgagtgccattcgaagctgaggtacaactattctgctaaggaatgcccaggtgaaagaaatttggatggtccaagcagagtgagggggcttgagaaagaccgcactgagatcttaaggatgcttgatgagttgagagaccaggtacagcaatcttgcgatgcaactaatgggccaagtggaagtgccccaactactacagcagcagattcccacatttcatatggtacttctgaccgattgaatcaattgaggcatattccaccacaattgcatcggaatgattcacatcacaccccatcattgaatgtacaaagtcctagtgtttctcgtgtttatgctcccctgcctgcacaacaagattgtgtcggatatgcagagctcatttcacatgctagacgctctagctatcctgccagcctctatccatggagaaattttgataattatttctttggacagcatgatcctgattctcttctctcttgccgccatgatggcttctatcaccaagctgcctgttcttgcttgcattgttgccaccaagaattcttgcctgtacagggaaatcacatgggcttcaatgatcaaagggcaccatatcttctgaacggttatggggcttatcctgtggacagtcccttacttggtcagcaaagatacagtagaagagccatcaatactaccttgcagcagaatcacatgagggtcaacgttagcaagaagcctgcacagacttgtgagccggtcgcaggtggtgcccctttcaccatatgctgcaattgctatgaagttctgcagataccaaggaaacagtccctgtcaggaaatgagtacaaattgcgttgtggatcatgctcacatgcaattctagtcaagcttgatggaaacaggctcaatgtatcagaaattgcactaggtacacatttatctgatggacaggaaaatgacatgggaaccgatgggcaaactccggacaataggtccattccagcttatcgtttttctgttggaagtcctgcatctcaagaaaaagacctgcactcaaatttgagtgagtcagagaacaaccatacccctctagcaactgactcagagggcacttcccagtccagggatcttcctcctgaagacagtgcagtttcccatgtaccaaacttaccacatcgtagtcattctggatcatctccatcagaacattctggagtgggaagtagaagtacacattctgaacctgaaaaagttataccattaactgaaacttccaagcagaattcagttaaaggtatatgtgtatcaaacaagatgcaatctccaaacaatgagtttgatgttactgaatacacagatgatacattaaatgcgcagcaagatactgagcaccctaaagcaacaaaggacaacaattcttttctcactaatctgataaaaaagagcttcaaaattaataatggaatgcgcaacggaagagcaaggatttatgtaaatggctttcctatctctgatcgtgcggtcaggaaggctgagaagctagctggatcaatctgccctggaaactattggtaattcttttgagttaacatgttatttgctaactgaaaaagggtagttctgacacaaatgttgtcttgattttatttaacgtaggtatgactaccatgctgggttctggggtgttatgggacgtccctgccttggcatgataccagtaagagcttctggcatgtattttttttcatcgctttaagcggtactatgacgatcaaagctcaaactggatatgttgcttgcagccttatattccagaatttaatttccccatgcccaagaactgtgctggcggaaacacaggcgtatttgttaatggaagagaacttcaccagaaggatttggatttacttgtcactagaggactctctgattcccctggtagatcttatgtagttgaaaattctggaaaggtttcagatgaagtatctggtgaagaactttatggccttggaaaacttgcaccaacgtaagtatctttctctattggattctgtgaataaatcactccattttgttacacatcgaagcaaaatatgttcaatgttagattgctgcaatagtaaaattatgcagtagtacctcttatcattgagcagtgatataatccctctgtccctaaatatctgtcgtttttgcttcacaggaaacaactttgactaaatatattaatatttatggtatataattaatatcattagatagatattttaatctagtttttaataaatttatttggaattacaaattttgcacatattttttataaatcgaatcaaacttttggcacgaaaccaatggcgacagttaattcgggacgccaccagccctgagccgatgcacacacttgtgcagttgatctatgctttgtgttaggcaggaactccatcgttcgttatttcttctgtatgaaccaaaccctaggacatcgttgtggctacataggcatgtcccctgcaccctcataatcagtatatattctttcgtgggatatcacacttacatggtaaaaggctggtcgatccttgacacttgctttggtccgaaccctaggtgtggcttgccattgtcctataatgcctaaaaagtattcaagaaccaacttaataaaaaaaatctttcttgttagatggtttaaggatgccatactcccattcttgataaattgtcctagttcatttgactttcctcaatattgattttactgcacttattcagctgaacatgtagtgcataagaaaatgcagtagtagtgcggtggatggttatgagtagttgtaccagcgagtcaggtttcaaatccaggatttcaaaaaaaaaaatcctctcgttgttcctccccatgaaaaacagtggcagtgtgctggcccaggtcacagtgcagttttataccatgaggccgtggtttgttggttttctcgagctggtttcgatgaggtttcttcttagtgcaatgccatggggcagcctttcccccaccggtcgaatactttaacatgtagtacatgacaatgaacttgtaatctacagatcataggcagcactgtcaatctataaaagtgtcaaatgactacatattgcaccgttagtagagcatggttttctggtaaaaatattggagcagatttttacaactacctgtcggatggcttctggaaattttgtcaatatttctcataaaaattaagagctccattaatctatgactcatgagtatcattttgtcaatatggtttggtatcattggttgcttttagctatccataatgttggtaggactgtttgcttgtctatttattagactaatttgtctatgctgttgcaagaactttggtatgtggcgtgatgagatacatgattttcattttcagaacagtcacctgtgtcttgaattgttgtgttggtttctcttccatggaccacagctacaatttcttttcccataaaggcaccgttaactcaagtgtatatgtttgttcttttaatgtgcagagttgagaaaatggggcgtggatttggcatgcgcgtcccaaggttcatccagtgacaggtcagcttggcacatctaaacttctgaacctcgaaggcaaatcgatggagataattcagatctactgtaggttacttcaattgtgaagctagtttcatgtatctttctttttcctgattatattccgattaacatgaggcctagttcagtcaagttgaggttttcttgtaattttctgatgcatttgtttttactgaaaattttcctttttcatttacatgttatgcaagaacaatttgaagcatttacctaattgaatcgtatgaattgtatcaaattagctaaaagggaagtaataactaagttatctcatgttgaatagttaggtcatgattattttttacaacaattatatccttgatacctgtagaaataaagaactggtcaaggattgtgaatagctattgccaatagaattcagggatggccctagaaacaagagcaaaagcttctactccctccgtttcaaattataagtcattccaagaatcttggagagtcaaagcattttcaaatttgaccaaaaatatagagagaaatataaagatttatgtcataaaataggtacactatgaaaatataactaacaaagaatctaataatacttggttggtacaaaaaatgttattattttgctatataaatttggttaaacttaaaaaactttgactctccaaaaatttgtgttggtgcaaaagctgatctgcaaacataaagggctaagacccgattcaaacgttaaggcgtgccagccgatttgaccttacaatc

SEQ ID NO: 5058 - DNA, 6685 bp, Sorghum bicolor
agtcttcttgtttaggagtgtagctagccttctcttgttgttgtgctttagtgtttagccttgtactagttttgtataggtggcttgcatagcttagttgagctagtgctagatttgcttcgctatttgttttactaactcacttgcttagtgaagtttgtagaatttttaaataggctattcaccccccctctagccatttggacctttcagcgggatcgcccggaatccggtgtagctgctgtttatggagaggagcgcccgtagtcatttccccgatgattaagcatatcgccgaacctcgttaaaaaatatcgtgcctcggtatcgttcttgtttgcgtattttcttctatgttgattatgcttccggttaatagatccgtttgggtctggaactaaccgtgcactctaacaagtggtatctagagccagatttatagaagaagatcgtggaagatatgataaatatgtttcacaccgcgcaaggctcgcatgggggtgttcagagaaggacatagcgtaaggtggagcatggcggcgatcgatgactcgatcggtggagttagaaacttcgagcggtggctcggaccgttcaataggctgctagaaattttttttttgttggacggagagcgcagaagcgaggaaggaaaaaaaagcaatttatatgaaaaatattaaaagaacgcgtatgtcacagtacaaaacattcctcattcctggcgtcacctatttaaggcctccctccactcatcacccactccactccgttccggtgcatcgtcttcgccgatcgttccaaggtgagcgagatgaggatctcgaagctcccgaagtcttggggggtgagacgaggatgacggccacacccttttgcttgtttctcgtttctcatccttgtgcattggaattgtcagttttttctcgcccaactttttgggacgccgttcttatttccgtttccgaagctgcggctcgccactcggccctctgaaaatgccaaaatattatctaaaattcgtcggtggagcgcctgtgcaatagaaaagggacctgttcgcgttttctatctctgcaaagggaatttgcgaaaaaaaaaagtttcgctgctgagtgctgccacctcgtcttcttcttcctctccggtacggtagggctggcctggccggctgagtacaggaaacaggctttgctcgcgtcgcgccgtgggttctgttctgcccctgctcgatttaccgcgaggttaattagcggcggagccttgcgtgcctccggattgctgcatccgtcggcgagttcccaactgatcgacggtactcctttgtagctctgccttccttgcgtatctgattattccggtcgggggactggcacgtagcattttcgtttttatttaacaaatattatctaatcatagactaactaggctcaaaagattcatctcgtgatttacagtcaaactgtgtgattagcttttattttcgtctatatttaatgctttatgtatgtaccgcaagatttgatgtaacaggaaatcttggaaactttttgataaacgaggccttgctggaatttccgactgtagttgatcgagtgcttgcgatttcttttaggacatgttcattagttttttttttgtatatatatatatagtactggaccggttggtgattctacggagttcttttctcccctcctttttttttgctattattaattaatataaaatattctgttcttgtccacgttcctcttttttttactttttcagtttggtgctgctcttactttttttgatgaacgtgctgctcttactttattctatgctattcgtctggtgcaggtgtagcaacctgtcacgcgtagataatgctttcccactgcctatccagatggctagctacgaatccttgcttttttgcttacgtttcgctttaatacgaagcagcagcactgatgataaatggagaacgcccctgtttgttttctgcgtctgaaattctgctcttgcctgacttgtatacgttatttgtcgactgtcgagccagagactgggaccttcaaagagcaataggactcatggaggttggagacgcaagaaacggttctgcagcagcggcacagacaaagggaagtgcggatgatgccgcccgcaaaccgctccctccttgctgcgtcaaggccaaggcaggcgtgcctgaatccgaagccaagtgccatgatactgtggtctcagggtggttcactgaacccagatcgcgttttggtatgttcagaattcagattggtgctaacgggctatgtgaccatcatttgtttgtatctaatatatatatatatatatattctttcagcagttctgatatatatatagtaccgaattgatgtatgtgcaggcaaaacaagcaaagtgcagtacttcaacaacccgatgtggcctggtatttctcttgtttctgctaaattaatagaaatctggcatgtttttttcttccaaacatcttcaggttcacatgctgtcgcactacaatattttgttaaatttaatcattttatgatgatataaaacttggtcattcgtacctgcctaatttttatcggtttcataacttcagaagatttgatatgcaaaactgcctagtggagactttcaatattgctctacttgtgtatgtcaaaaatatttgtcccctaagagcctttaatggtccatatgtcctacctattcagaaatcaggagtttgatcaacatcttttttttatttgttttattcacaggagaggctcattcactgaaagtggagaagattttgtttcaagggaaatcgccttaccaagaaattttagtttttgaggttattttttatctttgaaatttgcacatgaaaacccgaactcgtcaatcattgtactaagtagcactttcatttctgttcgcagtcttcaacctatggaaatgttcttgtgcttgatggtatagttcagttgactgacaaggatgaatgcgcataccaggaaatggttactcaccttccactgtgctcaattccagcaccgaagaatgtatgtttcttgaccttttttctgaatatactgaataaatcgaattgaaggatgttctcccccaccttacgttttcttatgagtaactttatgggcagttcaccttatgatataggcttactaactgatgcaggttttggttgttggaggtggtgatggtggtgtactgcgggaaatagccagacatgattcagtggatactattgatatatgtgagattgatcaattggttattgatgtaagaatgatcactttacctatgctcaaaattcaatgaataatagtgtgaatatattttttttctgatttttctctacaaactgtgcaggtttgcaaagaattctttccaaacatatccattggatataaagatcctcgtgtccgacttcatgttggtgatggtatgttgaaaagctggtacctggtggtattttatatgattgtgataggctgtagcctgtaggatatgccactgtagttcatagtatgcttgcttttgttttgcagctgttgacttcctgaggaattctcctgaaggaaaatatgatgctattattgtcgattcatcagatccaattggtgggttcttgctatcacatattttagtaataagaagtatagaactctcttgtacatttgtttatcacttcattcacatgtcattcttgataaggttgcttcttgttgatttcttttcttatcctgttatctacaatagctggtttagtatgcatgagcacgtttggaatgcaatatttcatatgaaattgtttatttacatgtgagggaacttttggtggttccaaacataacctcgatatacctagttgatttacacctgtgtcttttttggaaaattaatatgcgttcataaagttcacttgattgattgataccttttgtttgcacactgttttaaattcctttcatactgattattacagggccagcacaggcactcgtggagaaaccatttattcagacaattgctagagctttgaagcctggtggtgttctttgtaatcttgctgagagcatgtggctgcacacacatctaatccaggatatgcttgctatctgtcgacagacattcaagggtgccgtgcactatgcctggacaagtgttccaacatatcccaggtattatgcactaatattttttccaattatctgcatgtgcatttttcttctctttactagttttctgagttatcttctaaaggctaatttttttggcatatttggtttagagggcatattgggttcagagtcacgacattgcatatatctttatgcaccgctggaccaccagcgaagcacgaccaaataaaaatatcatttatgtttgggataggatattgccatgctcgtaatcttgtgaagttcatgatcttaagttctgctcatacaacacagagagtaggcaaaacatattgtgattgaaatgactaaagattggactcattggcaagtatgtggatgaatgagctgaatctgtaaggatctgctgtccaacttaccgaagaagtttgtggtgtcctactttgaaagatttgtggtcacatttttttatcaaacacgcaagagagctgtgcatcattatattaataagaagatttgctggccacattatgatagacaaaatttcaattagctgtttctgttcaatgtttggtcagatatttttgtgtccacttttgcaaaaaaaagaaaaagaaaaaaaagaatcagctaatcaagtagttatttggatttccagtggtgtcattggatttttgctatgtgcgaaagaaggtcgtgaagtgaacttcttaagtcctgtgaatccaattgagaaaataggagctggaaaagctggaagggagctcagattttacaattcagaggtttgtccagagtatttcgctatccttgctgcttgtctttgtgaaagtcagtccacaattacttaggaaattgacctacagaccacagtaccttttttaaatttcacaggcatttcgcccatgcttttgtcacaacaccccacaaaaatgactactgactcttcatttctgttgtgcaagctctgaccacattggagtacttgtgatcatagtggtcctctgttgttttttgtttgaagatattctgcctgacatcggatttctgtttgaattttccttgtttaacagattcatagggctgcttttgttctgccaacatttgtaagaagagaactggaatcatatgccactcctagtacttatgctgaaaacgtgagctgtttcttaattactctgttgatggtgtttattctttgtgtctatgcattttgtatcttgaacagcttttgcaaatgcagtactttgtctgtttctttgtgttgaaattttcacgatagggaagaacacaaccacagttcgatttagttgttgcacaaagctttccatctatgatcgtcacaattactggcatacacatccagtactgatacggaagccactgctctttctaaaaacatatccagtagtgatagtgaggccactgtttttcttttcaattgatgagatgtccagacgtcattactggaacactgactgggtgcctctatataggatgaggatcatcctgaggactgttcaacagagtactttttcgcaattgctacagcagtactaacctttgcctctattttcatatacatcatgacaggagaaaccgaaagaatcagtgtcagaaccgcagaagataaagatattgtcaaacaatgccattcttacagcttcctaggcctgagccatgctctatcttgctcggtatagttgtattctcacagaataaatcagtcactggattttgttgacaccgcacgagcagctttggtatagtgacttgagtgatgatcgattgaataaggggtggatattgaactaatgcaatgcctgccggaacaattaatatgttccctatcttgttagctagcctgctgtttgttgtgcacaatttcacctgtaagttatgacttgtatgacccgttgatgtataatagaccttgcaaactgtgaaaaaattgtcaactgatgtgaatgatgtacaaaaaaaaaagatggccaataatggaggtgctatctgctgttcactttgcccctaagactacatgctttgaaattaggattagttatttcttatgagtttttgctttgactattttattgggggacctatatcgttggagatgctcaccaagaaagaactgtaagacactaccgcatattataacttctacacgaatgcagtagaaataaacactatggtttactttaacatagacaacatgccgtgttagcatatatgaatcttcatatctcaacatttactgtgaaagtctacacctttaacttggacttcaggcttttggttcgaactcaaaagttgagattgtaggaagtaaaacattagattagatgattaaaagcacggggatacaatctgtgttcatttaattattgttctaacagtataatctctctgaacagtatccattggtaaaatggttcaagtttgagttatatgtaagcagcaggttcaggacaacaagatcctgacatcctgttagactagagttatatctactagag

SEQ ID NO: 5059 - DNA, 2835 bp, Sorghum bicolor
aatcaatttggccttgggtatataattattcataaaagtcccaccaggagggccaaaagcaggccattcatgttgatccacaccgccgcatcgcatctcgccatctcggcctggataggctcaagataaactaaaccatgtcagaaatccggcaatggtgacgagacgagatagctctttcacgtcgtcttatcaacataccacgtagacttcgtctcagacatccatgcgacaaagcactgcctaccagattaaccccccctcaaaccgatcgaatccaacacgaacatagattgatccgaaccacaccactatccatccatcccacaaaaattattatggcaattgtattggtcaaactttattaaattttgttaggtttataaaaaatattagtaacatttatatcttcaaacaaatatattataaaaatatatttatcgatttatctaatgatactaattacgttatatatattaatatttttttataaatattattgaccatagttaaaaatgtttggatgacactctttaggagacggaggttaattttattcgaaattggttcaagaaaagaaaacaacttgcccaatattattggcaccagcatcatacaacacgcacgcatatttactacttcctccattttaagtaataaatcactttgaatttttttgtttatatattttactatgtatctaaatatattatttatccagatgtaataacaaagtagatgtaccaaaaaagttaaaacaatttataatttgaaaccgagggactattagcagaaaagtatatctaatctccaaataacaagatccggtcgatggcatgcgcattgatgcatgcagtcaatgtagtgtgcaatgcactagttcacgtacactatcagagttcaatctaggtactttggagtagttttgtcattgtgtcattgagacctcctcttaccaccaaagttgtcattttggcgtccatgagcgaaccgggattcgacaggataacaagggacgctgcactagctgcactaaactaatgcttcagggtgcccacgattaactgccagccctggactggtctgcaagtggtggccatgggcatgctgctcgttgcgattccgaagcgacccccactatacctttccgctatcggatctcctccctccaaaaaggccatggcattttcgatccagcctgctgctgcttaatttacttgagtaatttatgctagtcccaatgaaaatatcattagagtcttatttgcatcaataagctgccacataagcacctttgatgatgtgacaatatttcatttttaaaaagagagaagtgaatttcattgcacgattaccaattatcaatgagccatgaaactaaatatctataaaaccatagcatgaaacttcctattaagactccttccgtccaaaactataaatcaccccaacttttcttgaagaatcgtcgaaccatttcaagtttaactaaatttatataataatataataacatttataataccaaataaatataattagattctttattaattatattttcataatatatctatttaatatcgtaaatctttgtaattctctttatggttttgatcaaacatgagatattttgattctctaagaaagttgaaatgatttatttgaaacaacaaggtttatgtcatgacagaagcaacactatataaaactctccaataaggatggtctttttagtaccaataaactaaccatcggttagttaaaatggttcttccttgcagcttcctcgcctggcctcgaatcggtgggtatatatattggccttgggctgcatgtgttttaccaccactatattcgatcgatcaccatctgtagacaacaaaaacatatatattgtactatactagcttgtttgtgcactagctctatagatcctttgttactcactcatcatagtatacaacataacttgatagtcttgcttggtgatcgacactatggcgtcaaaggtggcagcgatggcgatggctgccttgttgttctgcgctctctttgcttcttggacgacgacgtcggaagcggcacgcatggggcggcagacgggtgacgagcttgccgttgccgcccccgtcaatggaggtggcggcggaggaagcggcaataatgtggcctactgggagagggagagggagaggcatcagcagcgcggcctcatcgtcggccgtcggccgaggctcgcgtcgttcacgccgcgtgacgacggtgctggcggcaacaagagagaggtgccctccggcccggaccccatacaccacggcgacgcgccgcccacgtcggttgctgctccgacgagcccatagaggccgggaacgaatctatacaagaggaagacgagaggcgggtaatgacgtggacatgcatgcttgcaggcgttgtacgtagaaggcgtagtaatgtacgcgcgcgtgcgtacgtacgttgtttggtccttgtttgttgcattattagattgtaccgtgtgccgtgcgtttcttgtatttgttcaactggggagcttgaatgtgccaaaaataaatttcttctctcttatataaaacaaaatgtctggtctacatataatttcttcgtctacaaatgcgtaatgcatataaagcatcatgtgtcgatcggcgtggataaatttctccactctcgattaaggatataactttagcttcggctagtgtagcacactggtacagaggccttttgtcccggtcgaaaaccacttgtagtcccgggtggcgagccggggctaagggatcgggacttaaagtcccacctttagtcccg

SEQ ID NO: 5060 - DNA, 4433 bp, Sorghum bicolor
tatccacaaccacacatgaaatctcaaccctctcgctaatgtaacatatcgaggaatgtgagggaaaagtgatttttaattacataaattcaaaataaagtccaaaaatcacgaaacttggcgacgtagtgtgttatcacatgttgagggtgtggtaaaaaattcataagattttgagcaagttgggacacctgatgtctaaaacccagacatctccacatgtgataaatatgattgtggagaacactgggttttaaatatctggagttacaatttgctcgaaactttatgaattttttaccacaacgtccacatgcgataacatggcacgtcgccaagttttataatttttagagttcatttggattatttataattaaaaatcacatctacgacacatggatgatcatgtttcgtatacaagacattcaaacttttggttgagtttatggatacagcctcaaaatgcattctcgaacatgaatatcatttttcgaatgcctatactttattatttcatacacctctagttcaaatttactttttcgagaaaaatgcaaagaaaataaattaattgatgaaatatagcaaaatgttataaaaatctctaaaatttgaacatgtgcttttatacaatatgcaagggctacagaaaaaatttgggtttaaaattcaaaaaaaatcttccatctttgccgagggccaccgctggccctcggcaaaggagctctttgccgagagcctaacggggtggctctcggcaaagacgacgactgcagcagccgtttacggcgcggcacctttgccgagagtctttctttgccgagagccaggctttcggcaaagctgaccttccgagtgctcggctttgccgagagcttagccgtgggcaaaggttctttgcctagggtcctccctgctctcggcaaagggagctttgccgagggtctggctctcggcaaagccaggctctgggcaaagctccagtttcccgtagtgagtgagatttgtataccttttaccacttgatgctttgcgcgtgacattgttgtacttgagaggtttgtagtcttacaagatcacaccaattgtgtttgcggtgtggccaccactgatatactagagggaacaaggcttgcagcgtttggactagaggcttgatagtgaacatagaggggagcggtccagggaaggtcatatcggagatccacttgcgcgtggggaaaacgtggggcctatccacagagttacccgatcacgagcttggccattataagagcattcttgccatgggctccaacgaggactaggagaaacgaagaacttctcgataccccgaaagaataccaaagtcatcggtaggagtctatatctctgacacctgtatttatattttgtacttaggttatgtgctttgccttcctatatcacattaataagattggaacctaggttgtgtatatcttttgcaatagaaatagcaacatacaaaatcatagttgtatatctaggcagattgttttattgcatagattttgattaggtctagattacaaaccataattttaaaagtagattttaagttgcctaattaagtctctcttagatgttgttctgctcacttggttgtccatgaggcaagcaaacggtgagcaatctaagacggaaagaaatagccagtgccacaataaaaggggcgaagaagagcaattagtggcctgccaatgcatgtttggtgaagcgtgaatacctagtaaccccttaatcaatggaacgacgctgttttaggtgctagtaaaaactcgcatgcacgtggaagaagctcgagaggacgaagaaatgttggagcggtcaatggcgtttgcatcggccacgaggacacggagttggcaaccatggcgtgaagacagcgaaggctaaaattggcctgcctcaacataggaagcggagctgcagtcccccgccttatataagttcttgcgtcccaacctttgagaggcaccagctgcagatcgatcaaagttaaacaagctacaaggacaggcatagctagcgaaaatggctttgggcagcaatgctatgagggtgttcttcctccttgcgatggtggtgtgcgccgcgcaagcggcggggaaggcagccccaaaggagaaagagaaggggaaggacgacaagtccggcggtgcccccgccgaggcgccctcaggctccgccgggggcagcgacatatccaagctcggagctaagggcgacggcaagacggacagcaccaaagcgctgaatgaagcgtgggcggcggcgtgcggcaaggaagggccgcagacgctcatgatccccaagggcgactacctgacagggcccctcaacttcagcgggccgtgcaagggctccgtcaccatccagctcgacggcaaccttctcggcaccacggacctgagcgcgtacaagaccaactggatcgagatcgagcacgtcgacaaccttgtcatcagcggcaaaggcaccctcgacggccagggcaaacaagtatgggacaacaacaaatgtgctcagaaatacgactgcaagatcctgcccaacgtgagttgcttctccacccggccaatatacgcagagcaatttggctaggcgtcatattattctttcttgttatattaactacgtaacaaacacgatcgatggtcacattaattgcagacgttggtgctcgacttctgcaacaacgccaccgtctccgggatcaccctgctgaactccaagttcttccacatgaacgtgttccagtgcaaaggcgtgacgatcaaggacgtgaccgtcaccgcgcccggggacagccccaacaccgacggcatccacattggtgactcctccaaggtcaccatcaccggcaccaccatcggcgtgggtgacgactgcatctccatcggccctggcagcaccgggatcaacgtcaccggcgtcacctgcgggcccggccacggcatcagcgtcggcagcctgggcaggtacaaggatgagaaggatgtgacggacatcaacgtcaaggactgcacgctcaagaagaccagcaatggcgtccggatcaagtcctacgaggacgccgcgtgcgtgatcactgcctccaagctccactacgagaacatagccatggacgacgtggccaaccccatcatcatcgacatgaagtactgccccaacaagatctgcactgccaagggtgactccaaggtcaccgtcaaggacgtcacgttcaagaacatcaccggcacctcatccaccccggaggccgtcagcctgctctgctccgacaaaatcccctgcagcggcgtcaccatggataacatcaaggtcgagtacaagggcaccaacaacaagaccatggccgtatgtcaaaacgccaagggaagcgccacaggctgcctcaaggaactggcctgcttctgagcgatccgttcacatccactcgccgcacagccatgtcttcgatcttctcgctccgaacaaccatcgtcgtctatcttcaccagctatcactaattttggtcttctatctacgcaacaaacatagggttgatcggtgcatcagatcgtcatccttcaatacctttctttatttaggggtcatacaaatattacccggctattgtaatgtaatcctcccatatgcgcggcaccttccgtggacgcaggcaggcatacgggttagtgccgatgcccatgaggaggccggctgaaaattttatgttcttttcacgtttcctacggattttgtgaggcttccatgcatgcatggccaagagatgtgtttaagagcatctctaagagtatttactctgtaacaaatcatcatttggaaaattatttgtgttttcaatatctttataccctgcaacaattattatatacatatcttatgcgcattccacagagccattatcgtcgtctccatctttattaatttggtgacaaatctgaaataaataacatttatatttagagacccatttaacctaagccatgttgcaacgtgcataagcttaggttctactagccagacaggctttgcagctccaaatgaccaaaccaaggaacatgaaaagatggtgggtgaccaagaaagaaaatttcactcttttatattaagaatatgtaaaagatatattaaaaccctgactaaacaaaatattcatggtatacaatcacgtagatcaagttattatagtattaagtaacatgcatgcatgaacgattaatgtatatgctatagttaagttattatgaaaaatattctctttgcaattgatacttacaaactatataaaattaatatccataacattatttattcaaattgttaccctagataaatttataagtacattctataggataaatgtaatcattgttttttataactaggagaataccccgcg

SEQ ID NO: 5061 - DNA, 3097 bp, Sorghum bicolor
aagtaataacaaactccagttgaagcacaaggatacccttagatcattgtcaatttttatacagaatgctaatgaaaaaccgacaaggacttttttttaacaaatactaatactgatagatgtagcactaaacaaaaatcattagtagctcattgaccacccactaggccatcatattgttaaatggaatccatcgcatcaaattgcttgtgttttagtgggatattgatggaaggaacgtcgtaagagttaggtcagtagagtattacatgcaggttatttcagtttataagctcttgtctcataaaattgaagtaccaacaatcgttaaataagacataattgttgactcagactggtcactgttgttttgtttgaatagacctcccttgtttcgattgctacatgcaaagctgcagactttctgtgtgcacctgttaaatcctgtagattcagctcagactttagtgcttgtgaacaagtcacatgcagccgtgcaaaaagttaacaagagcttctgacaaacccatgtcatccccaccctttaacattccccttataatttccaatagaaaatttttcttcctcacagaaagaaacagcagtacacactcctgtgttatcatggctaatttctatgcttataagtatcaaatctcttcgatgtactttgtgtggattcctcatttgtcctaattaatttttgttgcattaataaatgccaccaaattgctctacaaagttgtctagacttcttatcagcagtacagattgcaaacaacacacgatctatctgcccccatagaatccacaacacacccaaaaccaaagaatttagttccacggcacataaataggataaaaacctagaaaggtgctcagagattactgtacaattcattagtttaatatattggatatatcttcattttgccttaatcaattcagtcatttttcgaagattaggtgttattttggcagccttttctattgaagttttgtcttaactaattctatgtcactaataagcgctagtcaatacaatctgtggcggatcatttccttgtgtcactaataagcgttaagcaatacaaactgtggcagatcatttccttaacactcttgaagaagaaaatttatctataatacaaggtgaattacatctttattatgtaaacagttgagacaataatataaatgacatggaaacatgatcagcatatacaacaaagacttactgcaagtatgtaagcaaatgacgaaaattgccaatcacaaggattaatcccaatcatagacatgtctatttaaataactggcagaaaaaactaacaagaagtttacaaaatggtggaatgaataaaagaaaaatgaagccaaaattcttcactcttcattaatgttgtgcggtatggaacaagacgaatagccaaactttgggcttagcgtaagaaggcaaattattttgatgggcaataataaaatggaatgggaattttaagctatgctgttccaaaagtaagcatcagttctaattagaggtgaccatgttcacaacttgcttatgacatataaacctatttatagcagagccacgactgaattttagaaatagaacagtgtacagaatatggccttgtttacttcccaaaaaattttgcaaaatttttcagattccctgtcacatcgaatctttagacgtgtgcatggagtattaaatatagacgaaaataaaaactaattgcatagtttggtcgaaattgacgaggcgaatcttttgagtctagttagtgtatgattagacaatatttgtcaaatacaaacgaaagtgctacagtacctgttttgtaaaattttttggaactaaacaaggcctatacctatttatagcatcgtgtgtgttttactgatttgatgactaaattaactgaactggccaggcgtgctgcatgcatataacagaaaggaaaattagccgatctgtccgcccaggtcaaatcattcatctccagtccacgccacctgctgcgtacgagaaccagactgcagacggtctcataaattcgtttgggggcaataaaagaatatcctaccatcctacaactctagtctacaatcggatgcctgcctgcctgcgtgctgattcgtcgcgtgtaattccattccaggatcggatccagaaatggaacagcaccaaaccctacacttcaaatggtcatcaacagcagcacgcgacgcaattcggcagcgagatccaaagcgcagagccccacgcttgcacggctgaaacgaggataagcacgctaacagcagccgagccgagacggagatcagatctaccaccagtttgcttcccgcgtcggcggcggagagagaaaggagctggaacgagctggaacgaaacgtaccgttcctggccggctgtgtcccaaatctgggccttgacgaccttgccgtcgacctggagggagcgggtggcgaactcgacgccgatggtggacttggactcgaggctgaactcgttgcgcgtgaagcgggagagcaggttggacttgccgacgccggagtcgccgatcaggaccaccttgaagaggtagtcgtagtcgtcctccgcccggtagcccgccgccattgctagttgctccgcgccgctccgagtccggggccctctctgctcctgctctcgtcgtgccgatctggttttggggcgagagagagaagagtggtggtggggtgggggcgtggggaaaggaaggaagagggagggggggaaacgggaatggaaaggaagggggcacgggcacggcagcgagcgcgcggcgggcggtgcggggcggtgcggtgcggtgccggtgcgggcgcgtgcgctgcggcgggtgggggattttggtcgggtgggtttccgctttctcacgccactgatagcggtaaccgagccgacgccacggctaaaaaaaatggaaaacgcgtccttgctaggtgaaaacgcgtccttgcccccaaagtaaacttcgatttttctgaattcagacgccagtcagggccgtgtttagttttttattatggaaaaaatttcaggatattatagcactttttc

SEQ ID NO: 5062 - DNA, 3313 bp, Sorghum bicolor
aagtgctacactcagcaaatgctttgccaaatatattctaggctttgtccagtgtctcgggcactaggcaaagccggcgaatcccgtagtgagatttcataaacgtatctatttttatatccatattcatattggattctaacgtgatactaaatggatgtattggaatttattgtttatgttttcttctatctaaatctagacctttattagaaaaaaaaaataaaatatccgacattatctacaaataatataacaaagtgccatataaaaacatgtaaaacttaaatctatgagtaattactaatgtaaatgacatcaatgttaatataacaaacgatatgcatgatttgagctatttaaaatttatctatatggttcataacattatattaattttattattattaatgatacataaggttcaatttgattaataattttcgtatggttaaacctatttattttaagtactttagttattcatctattgataaatttatttttagatatttaaaacatttattgataaatatttatttttagttttattgatttttcatatatttaataatttaaatatttactatatctattattttatgagttgtatctacaagtgttatatgatcatattttctatgtgcataacgattttctttatactaaaattttcaataaacaaatagatatatgttattgtcaaaatttagtagatatcttagccatttaacggtatttttctttcacaagaaatcagcaaataatatacttttagtcacggctttttagtgaagcaaacataagtgcatctgttttgtacttttgtattcatattcgtatctgtattcaacaatgatttctagtggcagtgatgtaatttggcctagcggcactaactgtgtgtctacgcgtgtgtgcgcgctgttctattatggccttgtttagttcacatctaaaattttttcacctcattccattgaatatttacacacatgcatgaagcatttaatatatagataaaataataactaattaaaaaatttatatgtattttatgagacaaatcttttaaatctagttagtccatgattagataataattgctataattacaaatgtactacagtactaaaaaaaccttttagggtgtgaactaaataggcccttatgattagaaaacgtagttttacgatatgaaccgacaaacagtgcagatttagacacaaaatgctactaaaactattcgcaaaaaaaaaatgctagtaaaactgtagaaaacgtcaggcctgttgggctacagaaaaagaagggaaacaagcatgaggtttttccgcgtgttgggctctattcgggcctcaaccccacgtggtatcttgtcaaaaaaaaaccccacgtggtaggcctccgggctgacaaagacctcgtcccaggccgcaaatttcagggccgaagcaagccccgccggagttgaaaattccaattcgtaggacactcacaaatactagaaatgagtactacatatataactttttaaatttgtttcccaacctctactcgtggttagattttgcacatatgttttccatttatataatatagtttgttgaattagcctcgttcattctgtaactttgagcaatttggtcaaactgggcaacgtactgcaggtatctttccgttgcaggtgacgtgttccagcagaacgaaagcggttagcccatgatttggtgtaccccggtcactgaaacttgtaaaacattgttcgttgtgctttcccaaacctgaacccaaagctaacttacccgtgctgcctgcctccgatcctcttcatcgcacttgcaggttgcttcactccgccgcaattctcaccgtcgctcagtcgtcttctcctacggcactcaacgcatcccggcagcttttttggtgcaccctcaccactacatagccggtagctacctccgggctcctttgccgtgccataccagaaacgaggagccatggattcggtggcgtcgaacaccaccaccaccaccccgttcgcggcggcaggcaccacggccgccgaggaggaggaggcgtcgacgcggcgcgtcgcgaaccgcatcatccgcgcgctgcagcaccagctccggctgctgcaccgcgcgggcgcggagttcttcgtgctcggcgccacggggaacgtgtacacggtgacgctgtccaccgcgccggcgtgcacgtgcccggaccccgccgtgccctgcaagcacatcctcttcgtgctcctccgcgtcctcggcctctccctcgacgaggcctgcgtctggaggcagacgctccgcccgtgccaggtcgcgcgcctcgtcggcacgcccaccacctacccggacgtgctcgccggcgcgcgcgcccgggagaggttccaccagctctggtcggcccgcccggccaacaaggctgccgacgaccgccaggaggccgcgtcgtcgcggaggccactcgtcgacggcgcggcatgcccggtgtgcctcgaggagatgaggatggcgccggcacaagcgtcgcagggcagcggcgggaccgccgccgcgccgcaggcgatcctgacgtgcaggacgtgccggaacgccgtgcacgccgagtgcttcgcgcgctggaagcgaagccgctcacgacgggcggcgacgtgtgtcgtttgccgctcgcggtggaggcggccaaaccgggagcaggagcaagagcagtacatgaacctcgcagcctacatgaacgacgacgacggcgacgtcaccatgcagagcgccgacggcgggctgtgcgcggggtagttgccggcgttcgcttattcaagaggctaattgtgacttaaccgtgtctatctgtacataatatagcatctcatttcattaattgttttttttattttcatagggaactgatttgtacgacatacatcatgtacaaacctgatgtattaataaaatattcttatctatgcctatattgtactccctccatcccaaattgtaagtcgtttgactttttttaccccaagtttgaccactcgtcttattcaaaaaaattgtgcaaatatagtcaaattttaagtcattcttgaagaacttttattaataaaccaatacacaacaaagaaaagtgatgttttgtacaaaacattgaataagacgagtggtcaaacttgatattaaaaaagtcaaacgacttacaatttggaatggattgagtaatattattagctagtattgaagagcaaaaactgatgaaattgttcatagcagttaacaacacaatgtttcagaactgcaca

SEQ ID NO: 5063 - DNA, 5959 bp, Sorghum bicolor
tgctgcagtttgcatcaactccccctcctatgtgtcattttcggctgatgaataagttgaattccggatggatgtggcagaacttggtgataaatcaaattgacacaaccatagagtacacagaaaagtggaaacgctatcatttaacatacaaagatcgcgttcgattgcggatgaagactgccgaacaaccatagggagtagccgttaacgtgacgtcgaggctcttgattgttttctgcttaaaacagtcaattaactgcggccggaaattggcacctctggtggtgactggtgactggtgacggatggcacctgaaagccagtgttgattcctcgtttgggccttgtttagtttcgaaaagatttcagatttcggtactgtatcattttcgtttttatttgacaaatattatccaatcatagaataactagactcaaaagattcatcttgtgatttacaggcaaactgtgtaattagtttttgttttcatctatatttagtgcttcatgcatgtgccgcaagattcgatgtgacgaagaatcttgaaaactttttggatttcggtgggaactaaacaaggcgttggtctacaaggtttacgcaggagatcatcaatgactcagttaagttaggccttgtttacatgggcggagccaggatttaaacatagggggtcgtgcaaaccaaaaacaatcacgtgtatcaaaaattatatgacaaaggtgtacatagcaccaaaacaaacgtttgcgttgcgatgcaaaaaagcagaaaaaataaaaaaaataaaagagaaatttaactagtctcaggcctctaaccttcacttgatcattctatttctttgcctaggaaaagaatcacaataaaacaagtagttaaacgggggcaaaattaattagtactagatcctaacatcaaatgacaaacaatcagttacatatcgtttagtcttagacaaaacgatcacttaaacatgtaaagatggtcatttaaatagaaggttaaacagaaacaccataccactgttagtgtttaaaagttgagtacaacgggctaaatgattgtttagagtttagacgaataatgatagaaacataggagataagaaagataataggaagactaatgctaaataatatagatcccattgttggagatcaattcagaatgattaaacaagaaaaatgctgattttcaattaactagctaattagagtgtgtggtaggggacaaactgatgtttgataggcaataataaaaataaaagatatgaagaaaatattagaaatatctatttgtataagaaactattagagattaatataaaataagaataaaatcttagtacagataatatcattaactagctaattaaataattaaacatctaatctatgaggtgtattaagggagttatgggaagcttggggggtgccaggccccccttccctccgccactgctgtttagtttaccctaaaaaccaaaaactttttaagattttctgtcatattaaattttgcgacacatacatgaagcattaaatatagatgaaaataaaaactaattgcacaatctatctataaatcgcgagatgaatcttttaaactcagttactccatgattgaacaaatgtttgtcaaacaaaaacaaaagtattatagtgttaaaatctaaaaactttttagatctaaacaaggccttagcctttttgaattttgactgccgatggatgaaggaacaaacatcactctattcattttactgaaaagtcatgattaaaaatattttcactgatttggtacaggagaaaaacactgttcgagttcgctggaacctcctttgcgtgggccgaaatccgggagaattcacgttgatgggacactactttgtattgaactagaatttggcccatctagatgattcatgggctcggacttctcccggcccccaattcgcaaaaccgcagctcgcatctctctctcccctctccccatggccgcggcggcgccggaggctgcggcagacgttgcgccgtcggcgacgctgagcgtctacaaggcggcacggcgcatcaagcggcgggcgagcacgctgtacaacgcgctgcggagcgtggcggaggacgcggccttcgtagcggaggtcgcggcgctgtggccctcgctgccgctggtggccaacctccgctgcggcctctggtacgccccgccccgtgccttcgccgccacctgctacttcaagtccacggatggccacgccgggaactggtccttctccactgcccgcctcaacctccacctcgccctcctcgctggtgcgtgctgcttctctcttcttattattcttggcgtaccacttgtgtagttgtgtttgtggtcagtttggtggctcttgctactccatactggaaaaattattggtgccgttcgcttactcaaagcgagagacggctgatccgggtagtttttacttggattgaattgttcgtactacatcttttgtggtcagtttggtagacggctgatcctggtagtttttacttggattgaattgtaaattggggtgctttcaacttgtgaattgggggagctttcaactttaatataatatacaatgttttttccatgaaacgaaataattgttcaaaaaataataataaattgcaaagttatattactgttaaagcatttcaggaaccttgaaatctgggtttagcatatgttctggcatttcaggaatcttgaaccagaatttaggatttatgagtgtagtttcgttccctggccaagaaggttgaggaactttgcttcattggtttctcaatactcataacacaagcttggggtgaactgaagcacaaatatcctaggtaaactatcctgatatttgagtttgagtctatgtgtttggagatcacccttgttttgagggaatagcataaatatacctggacaatgcagaagacctaaacttctgagtaatagcttgatttagcctcagtttatttgtttgtttcctttgagcaggggagagaggagggtgcataatagttgattcaacaaggagagggaaacgattccctgatagcatgtcaaagaccatacccatttggtgctctgtcctgaaccgagcaattgagaggcaccggctgcgtgctctccgcaaaagcgtcgaagtgaattatcaagtggttggtcatgcctttctaattctaaatcctgctataattctgcactgtgaacatgtcatcagaagcctccttttgtttactgtatccttaggttaagcttaactttaggagcaaatgatgcaaggaataagtagttcactagtttcagcaatgcttcacaatactgttaataaatgccaataatattatctcagataaaaattatagtacctttccagtaattgatgcttggattatgcagtgtctataacaaaatccccgttatatttctatcgtttttatctgaagtaagagtcatatgatttctttgtccacttgttctcataatatttcaattttctttgtagtcatctactctgctgaatggagatgctgaaaataactctgatttatctaattgggatagctcggtgcaccttcctgtatgggttctaggcactgagaaaaatgctatagaggggcgtattgatgaatggacagaccaatttgaatcgtgtggtgcagatattaattctcttgcaataggtttgcaaaaaccactacgtcctctatggatctcacaaaggacacgtatatggttaaatgaagtgccggaacttgagtcatgggattttactcctattattctaatttccacatctgcatctgaagcagttgctacacaaaggatgtcttcagaattcagctggcactatattcctggagcaggagacgatgaagagagttgggcacgtggtctaactcctaccttattctggaagcattcatatgaccttcttgatgctggaccagatcattgtaaccagttagttgcagatattgttgaaaaagatagggtttatcgttcacagagaggtgaacattgtcctcaaattacatctaagtctctgaagagccttgatgctgcaaaatgtaatgatgatcagacaagcgagacgtgggctatgaacttagatccttgtaccagtacaatggatgcacaatgttctaatagtggtcttccactcttttggattggaacatcaaaccttgctgtatcatctactttccaaggtatgatgaataattgggcacttgcaattttctgtatagcgtgttctgttgtcatgtgtcatatgaaaatttgcaaatatatgtctagatgattactttttatctgctatacttagtaattgtgtggcaagcagtcacttccatataataattctgtacttaatttagttctgcgaggaaactaagcctactattttgctggcgaagagtgttattgaattctttattctatttatggtagttattttggtatgcccttttgtttagttggagatgccttagttggtgtggactgcatactgaactgtgacagcacgtcaaagctaccttctaattcatcagaaaattcttaccttgagctatctattgtggtaagcgcacctttctgtgaccttatgtgttttcactttatgtaaggtttcttacattacatcatgctgataatgttggtagggctcaaaggatgaccgattttcattgatgagaaaccttccaaaagcagttgactttgctaagaggaatttgattgctgggagaaaaatccttgtgtgctgtcaaaatggtaagttagcaaggttcacctgccaaaaagaaacagtatttcatctatttttcttgcacagcaaataagaatgtcatgtgatttcttgcatttctgtccatggttaattgagctctgattaattgttttacttcccttcaggagaagatataagtatttgtgtggccttggcaatattggccttgttattcgatgataacggtaagcataataatgttgcttctcttgcaaaactgctacactgctacacaaggatttgatgctattcctaatttgcattagtgcttgagattattagttcctgcagatgcacttttgttatgccatgccaagaaacataatgatgcatgttctagattgttgatgagtagttgtgcccgcaggtcctactttcttgtgtctgtactttaattatgtcaaatatggttgcatcatgaatgaataagttataactaattgtttctttcaaggatgctttgactatggaaattattttgtcaaaagagatgtcacaaagttggagatgaggaagaggctggtattcatctgcaaatttgctgtaaatgcacggccatctagaggaaacttgaaacaggtgtatggcttcctcagcagtcaaaaggaacagctgttatgtttgacatagcttggtcttgtttgacgtagatgaggtattagctctgatctgttgcttgagtaattggtgtggagtatcatctggagtttgtctttctcatagtttgttggtcagttggtgcattaagatcatgcccagaggttctcattggagttgccatcatggcaatgatctcattctgggatcaacgtctcaagtcgaggttaatcaaagacaagcttcggtagagtgcaatacaaagacaagattgcttggataacctagggatgattcgagtattatgaatctgcgacaacagatagaagaaactaagttaaggacatgattcttttgatggtggctgccagattggaaaatcattagtgcttaagagaatcatgttcagtaacattttcattagtacttgagatagaaggaaagtatttaaaaagatttatctgaggaaaataacagtgagaagttatcttcttgattttgctgtatttttgtctgcaaatcatgttcaggcc

SEQ ID NO: 5064 - DNA, 11111 bp, Sorghum bicolor
cacccatcgatgcctaggttggaagcccgtcgatcgcggccgaggtgctggcgtgccaggatgcgtccctccatagggcgaggcggcatgccatgcaccagttgtggccacggtcgatacttcctcccccttcggccagcggctcgacgccagatcaccacaacctgaagatggaggttgcacgtgcggtaggggcatcacgtattggttcgaagacctcaacggttgcggcctctgacgaacagcgtctgaaaagaatgccatggatgttggcgttgaatctgcatcggaggcgtcggtgaggtcctcgtctgcccaacgacagttcctggtctgtcccatcgtgctacccactgggtggaaaaggggtagctttggggacgaggtggacgatgggcccgaagcaggtgcggaagggtggacaaggaaggtgtcaaggtcgacgatcgcctagtgggagagggagtggacgcacgcacaactcgacagacatcatcgccatcatcctcgcagcccatagcatcctcgaacaggaccggtggcacgaacagcttggcccttgccctgggcgttgaaccgtgctcaccacacagggcctcaaggccaccaccactgacgagcccacagttgttagctttagcttgtgttttatcattctttgtaatcctgtcaaaggaccgtgtgtgttagttggtttagatacgtagaattgtaggtgattcgtagatatgcatggatcgcgttgtaaccgtatcatcaggtgtggccccgtcgtgtcggcgtctagcatgtcccagcggcgttccgaagaatcggatgatcgttggaggcgtcgaggcggcgggggtgtaaggccatgagccatatataaaccaacaagtgcccattggcacggtgcccgttttggcacaccaaatcttgtcaagtttgttgcttcgtatcttttctgttcgcgaacagcacacgccgtagggtttagtcgccgcggtcaccacctgccggtgccgcgtcgccgccaggcttgctcatcgctggtctggttccaacaacaatcgccgacatcagggggcagccagcagtgttcgtcccatcctcgacgaggggaggggaggtggaggtgggcggcgccctctccgcgttgggccgccgcggtgacgtcgctgctgctgaggctcgtctttgactggggcaggcacttggcgacatcgtcggccacgccgcgcgcacgcgcatccccagatgcagagggaaggcgttggagaagggtggtgaagacgaagccgacgtctccatggtggccgatggaggtgacgctgctccagcgcttgtacgtgcactgggaggagaagagacggcgaaactaggtggggccttggcagatctagtcgaggtaaggacaggggtggacgcaggcgctggactggcaactgacgccgccatcgacggaggcggggagggggctagggagggggatgcaaaggaggtagagggagggaggctggggaggtggaggcaggcgacgtggccaaaccctcttgttttctttccttgcgatagaatattgaagagcatgtaactcgtaactggctagatccaacgtatccgagtgatccaggcaaaaagtaaaataaagggattatacatgttgaagggaaccagacgagcccggacagatccaggcgctagctgatgccgctgctccgatcacccgacgtacagaccgcagcatgcatcgcgtgttgaagcaggttgatttctgacccgcgaatcccactgccgccacccgccacccgccaccgccactggtttttggctgttccgccgggcaaactcgccaccaattgccacccggggggcgtgatcctagcagcttttttttttttatctttcccgttgtttgaacgactcccggcgacgctgacagttccggcgcacgtcaccctaattgttgtgtacggagttcagtatatattgcaatctgcaatgtatggtcgctcctcgtcttctccatgttccatgccgcctccgctgcaaggatcataaacaaacactacacgataaatacgaccgacgactgcgtgagaagaaaagatcgtgcatctgatcgtgatcggggtgtgcgtgcgttgcccctgctgctcctctggtccggtcaggcacacagcaaagccagcgcaagtcgtcgtcgcggtactcaagtgagatccgggtcggggatccaggatcaggtgaaggcgatcgagcgcggcggcggggatggacgacgaagatgcggcggcgatcgagggcgggcagctcgcgcctcttctcggaagccgaagcgcgggctcgccgtcgccggacgcgtcgctgctccgccgcctctacgccggccacggcctcgctagatggggcgccaggtgcgttcactccgtaatcagttacgtacgttcctttcgtacctcctctcgagtttttcagatcagcgcctgttcttttttcctttttttttgtcaactagtagtagtcagattatcttgtcatttttttttccggtggcaaattaaggatgtgggagttctcggttgggctgtacatgatccgcatctggccaggctcgctgctcttcacggcgatttacggcgtcgtcgagtcctcctccgtcgccgtgtttggtcccatagttgggacactggtcgataagctcacgtaccttcaggtcagccatcattcgccatgttcaccaaactactgctccttgcgtttaaagttttatggacatggtttatttgctttcttacagcaactccagtgggtgcccttaaaatagggttcctgcttttcatttcagcaatccttaatttttgtgataactctgttttttaactgcactccaacaaaaaatctcaaaatatgacccttaaattcttttttagaagaaattacacatgagaccttgtcatcctctattgtgttcctagtcgaggaacatggccatgtattggcaacggaagaaaagagccatcgagagagaggtgcggcgagagtggggctcacccgagagatgaacagaggaggggaacagctgagagacgagcgctcaatggaggaggtggaccgttaatccctacaccaaggatcagggagagcaccacgagggccggctcctcaacagaggagcacggatggcgtcctcgtgaggtaacgagaagccgttgggagggagccacgagggtcgcccccttgatggaggagcgggtgtgcatcacgaggcatcgaggagccacgaggatagggtcgcgagggccgcaatatatagagtgatctataggaagatgcctagctgggatggagacgtctcactagggagagggacaatcggagttgggtgagtgccgaaggttgagcgggtgtgggtggaaagcctgggcgcgaacgaaaatcgtcgaaatagaaaagttaagactccctccagaccccttgaggaacaagggatcaagaggaagatttgaaggtctcctactgttaaggacccgagtaaggtccctcgtagggtgagtgttttgctctctctgcctcccctcatcccttaagagtagaaagaggacaagtagaggttttccagatagagttcctctgattaagacaatcttttgacttggacataaatgttatattatgttaaaaataattcattatatatagtatagtgatgtatacatcattgtataaaaaatactaatagagtaactatcggatggagtagtatgttgactaaatgtatgtcggggcactgctggtcgacaagctaacataccttcaagtcacccatcattcgccatgtttactaacctactactccttgtttagaggatgatgttgcaatggaaaaataataataagaccattatatttaaagcttgaacgtgcattgtatcattatgtttattagtttatagtatgatgttctatatttgtagacagccatcacttatcatataagaaaacaaattaaattaactaatactgagagaggtcgtaggttgtacttaatacattttgaatggtatgatacgtaaattaataacagaggtcgtatgttgtattaatacattttgaatggtacggtacgtaaataaataaattaataacagatgattatattgcatacgcatacaacttaggtgctgttttgtttcggtccaactgtaattaagtcaggctgtaattagataccgcactatataaatttgttagagcaactccagcagggcccctactcaagctccaatagctaaatatggatgcccagtctaaaaatattactccagcagggtccctacttcagatctcatatttggctggtcacccatatttctcccccagaccccattcctgttggcccaacagggcagcccccatcctccatcgggtgtcctagcctcagcgcatgctccctctctctacccttgcatgtgcatgacatcctacaataaccggctcaatactctaattgtgtccatgtccaaaggaagaagaaagaggaagaataaaaagacactgacgagtgggtcccttctatcattctctctggaatatgtttgggggcccaaattttggtgctactgttggagttgaagcaaaaaagttgagtcccaaaaagtagggggagcacccaaattaaaagtaggggcctagttttgggggctactgctggagttgctcttacccgtgttagagcaactccaaaagcttggctaaaattagtaaccaaattttattgtttagctattttgtaaaatagaaaacttcttaaaaaagaagaagatcgcaacagcctagctattttacaaaatcggatagctagtgtcagtggttggctatatatggccaccgaaaattaagagatagccaattttctattttacaaaaccagatatcacatctgttaaagtctatttttttgctatataaattataaaatagtctctacaacaaaaatagcaagttcatagagttgctaggagagcacgaattgtgcgtctttttctccactccacatgttggatgaggcgcgcatgggcctgttatatgcaggcttcaagtcttctttactctgcatctacagggacatataggcccaactctttttttttgtagaacgacataggcccaactcaagacggcaggcaatgccatacatcagccccttcctttttctgttaccgtgtggaaaacaaataaattaataagggatttgttactttattaagcttatctgcctttttttcattacattggcgtttgcgttaacagtctcaaccaaacaccatcttagactcatggcagtcagacactatcttagactcatggcagtcagacactctcactccacactcaatcagtcacttgaccacactaagagactcaacggctaaatctgtcttgcacactcaacattcaggccatgtttgattgagttataacttttgaaaaagtcgttgtgggttatgggtttttttaaacttggatgggttatggtttttgaaaaaaaaaacagctatgggatgtggtctgaaaatccaacaaaacaggagtctgaaccgttatctacataaccaatggcaagtgggataaatttttttatccaaaaacagctgaatagaggagtctgctttcaagtttgtactagagcaacggtaacttttggactaaaacagttgtggcttttgagcccttggttgagcttttagcttttagagacaaaagccacagccaaaacctaactaaacagggccttgtgcactctaatactaaatcactctgctacactcagatactgtcactcaaacactcaaccattgaggcactcacagcctcttcacttgagctcagctattcaacaatatttttctcttataataaattagtgaataatattttctaccatggtttatcaaccaaacaaacatgacgttgtcacagccacttggcactcaaccactcatgcactaagacacttgacaacttcggccattgagccactcggttacttagccactctgcctatgaggaagtcacacactccacactcaatcactcggcactcgatcggccacttagttaagtactcagtcacttgacacatagtcactaagccaattgccactcggacaccactgtgacttgagtcactcggcactcagtgacgaggccactcgtctttcaatgagtcaagcacttggacaatcagccactcactcaacagtcaacattgaaccgctcagccactcgggactcaaccatattcgcttgatcttatcagccgaatctatcagctattcgacagtattttttctcataacaaatcaatgaacagctaaacgaacaagtcagtaagcttagccagtcaatcactcgactactctgccacttaggcaggtaattcttccaccgcggatggcatacgacaccgcatggtagaaataagccgaaccaaacacgatcattctgttgtaaataaatccatgtcataacacagttttgtcagtaaggccctgtttggttccagggtattttttatcacccatcacatcgaatgtttggacacatgcatgaagtactaaataaataaaatttgcaaaaccaaaacaacagctagaggataatttatgagatgaatcttttgagcctaattagtctataattgtacactaattaacaaataaaacaaaaaatgcaacaatgcctattaaattttatcagccccaaccaataataacaaagaagatcttggcatgagctaactgtggttctaccttgtgttgcccttttagtccttttctctacgagtctaaggaataaagcggaatcacaaacaatataattaatggtacaagatttttgttttttagaacgaataactaggcacatgtttcatttagagagaagaaatagagttttccaagaggtagggtcgcagcgccccacaaccaaaactacataaatcttttttaaggcggtcatcaaaaacgatttagggaggcaggtaaagcaaccgcctctaatcaataaccatgattaatgatgattaaccgaagcagttgttttacccatctcagttaattaattaaataattaaaagaaaagaagacgagcccatccacagcccatattgtgtgtcgcttggatctcctgccaccgagagcctattgacatatctcccccccaccccacccgagctcgccaccggcgaatctggccaccccgagctcaccgccgatggatccggccaccagctcgctacctacggatccgaccgccctgaggttactgccaacggatccggttgccccaaggtcgcctccgatggatccgaccgccccaagctagccgtcgatggatccggctgccccgagctcgccaccaatggatccgctcacctagacctaggagagccaccaggggttgccgccgctcgcgctcaagggagggagaagcctgcctactgcttgagagggaggggctgccccaccacagccactgcgccacacagatccatggccccatgccaccatagagacggagagtcggcgagagagagaggggggagggagagccagtgggagagagggagggagcgagcaagcaccgggagcgatggagtgagggggcgcaggggaaggagagggtgcggggaacttgagatagcgccagggagaaaaggacggacttatggaggaggacagtgaaggaagaaaccctaacatcctttatttatattgaagatggctatcgggccacattgggcctattgagccttggtctttttggaggcgggctttatagtgtgcccacctccaaaaatagatttacgaaagtgaacagcttaagacgaccgtctctgaaaataaataatttttggaagcggttgcataacgttgactgcctcattaatatcttaattgagacggtttttaagacaaccagctcggttaatcggggattaaccgaggcagtcacgttaagacgaccgcctgttaaatattaatagaggtggtcgctgagggggtcagccagcaggggatgaatctgtctactagacacatgggtgatttaaaggctcctatcactcgggtgacggaaacaattaaaacgctgagttctcacatcaattacaagataggtgacaaacaggtgacacatggaaatcaaacacccgaatttaaaaactacaagatctacatctaacggaccatataaagtgcaaaggatccaaagaaaaaacaaattaattctatggaggcaaatcggaagaaattcaaataataaaaaaaatgaaaacacaaattgcaaagacaaattaatgaaggcaaattagaagaaattcaaatcgaaaacatatcaaaaacagaaattacagagacaaattcattctattaattctatgcaaggcaaattggaagaaattcaaaaacatatatcaaaaacataaattacagagagcagataaaacacatatttacaccaataataaaagaaatttacactgacataatcaatgtgaaaatcataatctgagactataagagaaagacatggattaaaataacacatgaacaagaaaaacatggtaactagacaattcctgacagcagtaaacaccgagcatggacactaatctgcattttacttgaaatctagacaatgaacaaagcagatttctaatgtagaagcaaagaagaaaggaagaaccagatcaaatgagagatgatcccatggccacaaatcttatctgggtgacaaaaaagaaaaaaaaatgcccaggcaacgtaaagatttaccgtttaatttacaacttacaaagactgtttgagcgacacaaggacaatgagtcacttcctaggaatcttgtatatccctcctagcaagcaattaaccaaagaaacacaattgcaggtccttggcctatggcttctagtccaaagcctgtccttcatcgtcgccggagcgtcagtaacggccctgcttgtttacgacgacctgaaagccacaagcttccctgttttcatggcgctggtgatcgtgaccaacgtgtcaggtgcgctagcagcgctctcaacactcgccggaaccatactgatcgagagagaatggtacgacggtaatatctcaagtagcttctgatcctctgaccctctgatcgagcattaacctacaagttgatcgaattgcattgccgcagggtggtggtgatctcgagcgggcatcctcctgcagtactgacggggatcaactcggtggtccggcggatcgacctgagctgcaagctgctggcccctgtcttctccggcctcgtcatcagcttcgtgtcggcgcaggcctccgcggcagctctggcggtgtggaacgtcgcctcggtggggctggagtactggctcttcgtctccgtgtacaatggcgtgcctgcgctcgctgagagcaaccgggtgagaacacctgatgcagctgaggccatgtcgccgtcatcgtcgtcgtcgtcgtcgttggagagcgtgacaccgacggcgaatgcgctggattggagggctaggatgacggagcagctatccatcataccatgctgggagtcatgggtggtgtacctgaggcaggacgtcgcgctcccaggcgtcgctctcgccttcctctacttcaccgtcctgaggtaattaacctagctgctagctagttgcaataacgtagcgctgcttaaattgtgtgtctgatcgatcaacgcaatgctgtgtaatgaaatgttgtgtgtgtgtgtggtggttttgcagctttggcaccctgatgacggcgaccctagactggaaaggcataccagcgtatgtcatcagtttggcaaggggtttcagcgccatcgtcggcatcggcgcaacgctgatgtaccctgtggtgcactcttgggtgtccacgctacgaacagggctgtggtccatttggatgcaggtaacgtatcctaataatgcacagcacacaagaaactaagcatctggtttcagtgaatttaaattgctgctgaataatcttgctgtgcggccagtggtgctgcctgctggtgtgcgtggcctccatctgggcggccagcgacgtggcgtcggcgtggatgctgatggccggcgtcgccgcgtcgcgcctagggctatggatgttcgacctcgccgtgatgcagctgatgcaggacggcgtggccgaccacgagcggtgcgtcgtgggtggcgtgcagaattcgctgcagtccgtgttcgacctgctcacctatgtcatgggcatcatcatctccgatcccagggtgagtgccacactgccactgccactgccatgaacgactactaataactagatgctgttactactagtaccaaggcatgtacagtacttgagatacaaacaagggaatgaagtgagaatgacggtcgatatgatcatgcacacttaatttgttgtgaacaggatttcagcgagctgatcgtgttgtcgttcttcctggtgacctgcgctgcagccatgtacacgctgcacgtctaccgcgtgcgcaagcacctcttccacttcgacaagatcctcgccaagatcagctggtgagcgacatggcaccatctctctctctctctctctctctctctctctctctctctctctctctctcatacctgcctgctgtccgatgcaggaacaaagtttcatgaattgattatatggccggttggcaaagcaagcagatatttccttgctcctagctactgtaaattgctgatttgacactgggtttgaaatacccggaacggagtatactggctgcgcttgtaaacagttgtgctccccccccccccccctctcttccagtgtgcagaaaattgtataatttaggaacatttttaccaagtatcaactgtaggtgaactggaatttcctaaaacaaagcgttaagactgaaggattttaatccaagatagtgtgattggatcagggtttttttttaaatgtgggcttcaaagttgtaatgagaaaatgggccaatacatacaaaccaagaaaatcctctgtcatcgatgttgttcaacattattgtcgataagtaacct

SEQ ID NO: 5065 - DNA, 4731 bp, Sorghum bicolor
ggcatcagtcttgcagttgggtttttcttgtgctgccatagacatggtttgctagtaaacagctgtgccattctgaaagctgtgctatttcctggaagtgggatcttcggtcactgtatgacctggataccaataccatgctgatatacttggtctgcactgttttattaatagcttcagtcttgtcccttttcgaatactatgaagtgtcagggattaggactcttcttatcagctaattgaaccctcaaatgttgctctgtttttatcatgtagctgttctttgtgttatccttgctttaccaaactcatgttaattgtgctgtttaatcactgattatgaatatgtttgcacagatatggaactggggccgacttctgaaccgctaaagcatctatcccactaggccagtactcaccatgcttgatgataaacctgcagatttctggtcagattctgcagctccgcggctctccaatctccatgcgcagaggaaacatatctacatcgttgaaagatctcgccttgtaagtgtgtcaaacacacaatgttgccaattgcttttcctccttcattgtgaataataattcccatctaattttgacgcaaccaccatgatccgattaggactcgtccctgagtaggaggagtatatccggctgtaaaggacaggacaggacgcggcaaggtttgagttgtgcagtgggcgcggccaagttgcccctgtgcttgtgcatagatagattcgggccaatcagtctgttgtttggacgtgcatctgtccccattaaggggcagatcacgaggggagaggcgcgagcaacaagtcgcccagctgattttggacgcacgctgttgggggcgtatgggtatgggctccgtcatgctgccggaagagccgtcgccctccggattcgtttcactgtactgtacctgctggtcgtaagtcgtaaacagaggataggatagatggaggccggccttgtttagatcgaattttttttagaaacattatccaattatggagcaactaggcttaaaagtttcgtctcgtgatttacaggtaaactgtgtaattagttatctttttctttatatttaatattccatgcatttgccgcaagattcgatgtgatggagaatcttgtaaagttttgagtttttgggtgtatctaaacaaagccttacttcaccccaaaatccaaaaacttttcaagatttcccgtcacatcgaatcttacggcatatatatgaggcattaaatatagacgaaaataaaaattaattgcataatttacctgtaaattacgagatgaatcttttaagcttagttactctatgattaaacaatgtttatcaaataaaaacgaaagtctagttcaggaaactaaaaagtttttgcaactaggccggaatggaccaggacctggggaaagcggatgctggtaataaggagagagtatggccgtatgggtgagctttgcgcctttgcacgccgtgtcttgccttttttggtaaaatccgtgttggggaagtactgctgctattttcctgtattagcagcgctggtgcaatggacttgcaggccatcatgatcgtttggacatactacacaagatcttgagggcatggtacagattgcaggcgatgattgatattgccagtgacaaaacgtacgggtgatatgcaagtgaagccgaagtgccgacgtcccctccctcccttggactggacctcctcgatcacacatctcctggccgatcggacccgcgcctaggaataacgtgtgttgcactgcagccgacgtgttttactgttcccctccgatctagcccatctatctctttgcaccctcggtccctccacctctctctctctatctctctcgttcgtgtgtctgtgaaagggatcacacacgaatgatctacacagcctaggcaggcacctccctccttgttgtccctttataaaagggacatgcctccccctttcgttcatgatcgctagctcgctgcttgccttttgatccctcgctccaaattgcccattattccgacatacacacagcaccagccgccaccgccgccgcggctgctgttctcctcctactctctccatattatctctcatctgatcttcactcatcacctagctatatatactagatcctgctagctaggtcctccatagctctatccaaatctcgatatcgcaagcaaattcctgatctcatcagtccctatagctcccatgtctgccatctacatgagccagctctccactgctctccctctcatggagggagatcaccaccaccaccaccaccaccaccaccaaggccacttccaagccttcacgctgccaaaggatcccccaatccttttcccctttgtgatcagcaatagtagcgccagcgaaagcagtctgagctatggatcggcagatcatcacttgttgaggcagcatcgtcaaactatgctcgagccccaacatgtacgtgttacttaattaactgtatagtatgtgttcaatttcctaatcatagcccatgcatgtgtaaaaattcacagatttatttcgtcactcatgctgcgcgcccttttatgtataataatttttatctaattatatatatcagatgattggtggatcgtcatcagctgcgagtagtgtctttgcgacgccgttcccgactgtggagagcatccgtgacgacatgatcgagcctgcctcgtacgatccatacgatatggggaagctgcaccaggtggtcggtggcgggtcgtcgatggatgcttgcagctggacgccgccggcggccaagatgaggatcacgaggaaggccactgccgccgatcccagtggtgccgggaagaagccgaggagaagggcgcatcaggcagcagggtacgacgccgacatcaacatgagcggccaaccaaatttgggtgttattagggtgtgctccgactgcaacaccaccaagacgcccttgtggaggagtggtccttgcggccccaaggtatctttctctgtttgttgttgcctcttccaatccaactcctacgtacatggtgtcgtggtccttgcatgctgcatatatacttatgtagtaatttatattattgcaagcccatgagtgtaacatatcttgttttgcatggcgcagtcgctctgcaacgcgtgcggtatcaggcagcggaaggcacggcgggcgatgatggccgccgcgtctacctccgggccagcagcagtgcccgccaccgacagcgataaggcctcgccgagcaacgccgccggggccgcagcagcacaccccaaggtgaagaaggagaagagatcagtggacgtggaccggtcgctgccgttcaagaaacggtgcaaggtggtccaggtccagcaggatcacgctgcggccgtcgcagctcctgccgcggccactgacaggccggctgtcgtcgtgcagcaggcggccaccgccgccgaggttggtgacgacgacgcctgtccgagcagggacctgcttgtcgacgacattggtgggctcatcagctggagcaggagtccgccggcggctcccgcatctgcagatgctgcctcctgcagtttccgggcgtcgccggcgttgccggtgcagcaggacgagatcacggacgctgccatgctgctcatgacgctgtcctgcgggcttgtccgaagctgatcgacgatcgatctacctctacaaaggccccagcaccataggctttttgcagctagctacctctagctagtgcctttgactgttagtgttactgttagtgttgttaccatcgtcgtttaccctacgacctgtagttttttttatttggcttcttgttcttgttgccagtgtaacccgtgtcactgttcaagtcatgtgattcgtttgatgagagagagagagagagagaagagagttgagagaacgggacgataggagcgagaagatcacgagtggaagtgatgaggcaaaatcgtgattatcatctctagctacaatagccaggacgacgatataattattgcatgtagtgtgagactgtgaggtgtttcagttttgagtgcactagtttttttccccatgctgtggctgtaatctggtcaatggctgctattgttatttattcttcattctggttgagtttcttgtaatggcaatctggagacatatcgttgcaaggcgtgcctgtgttcttgcgactcgttcatgacttttccttctgatggttctgtcagtatgatctgctttgagctgcagtatataaagcttttgtcagcttgtctggtggtctccattgtttcaccagttttcatgcaacattctcctaatctcctttatcatatgccatcttgtcaggacccgagtcaagatcctaatggaatctggaagtggagtagagtttaggggagaattagcaagaacaggatacactactggatccggcttctttgccgagagccgggagccctcggcaaaggcctcaaagccctcggcgaagtcttcgccgagagtctgccacgaggctctcggcaaagagctctcggcaaagaattctttgccgagagccacgtggcaggctctcggcaagaaacgccctcggcaaagcccacggcgccgtcgaggaacgtcaatgttgacgtcgtctttgccgagagctgtgctggtaggctctcgacaaaggaggtctttgccaagagccgtccaggca

SEQ ID NO: 5066 - DNA, 4406 bp, Sorghum bicolor
attcaatatattatgtatatatacttgtatatgaatttgacttacatatattttattgtattaattagatctagtaaaaaattgctaagttaatagaagaaaaactaatatttgattgtattatagaggaattgatgatgaaataaatagtgtatgtacatgatttatatgttaatagattaaagatttaaagtattttatatgatatagatgacatggtcattttttgtaattaatatgtgatgacatagacttagtgggaatgatgttaacaccttgcacgaagagataattcatctactgaggtttagttttataagaatactaggtgaatttctcacgcgttgttgcgggattttcttaaaaataaatcattttatatatagcattactatatgatattcaatatattatgtatgtagcatatgaatttgacttgtatgtattttgttgtattagatctagtaaaaattgctagctaatagaagaaaaactaatacctggttacattatagaggaattggtgatgaaacaaatagataggttagatttaaagtatttcacatgatatagatgatatggtcattttttgtaattaatatgatatggacttagtggagaatgatgtgaacaccttgcataaagagatagaacatctagtggattacttagtgagaaataatgtggataccttgcataaacagagtattcatctagtggattacttagtgagaaataatgcttttcttttctaataatcagtacatattgaaaagcagcagttgttgttgactataatcatttgctttactaattttatttttttaatgttcgcgtagtatatatgttctatattatttttttgtgatattcgcgtagtgttaatgtgatgtttgacaattatctttaaatatatgttaattatgagataaatgtttattaaaaagtatcaatatatatttacgtggggtcttgttttgaagagtttattgtaaggaatacgattgtgcaacaggttttaattagaatttaggagatatagtttttttaccttaaaaagtatggaatctatgttgttctcagcaattttgggtgtgtttagatccaaaacttgtttggatttagatattgtagcactttcgtttgtatttgttgattaatgtttaatcatgaattaactaggcttaaaaaattcgtctcgtaatttacaattaaattacacaatttattattttaatatatatttagtgttttatgaatatattcaagaatttgatgtgacgagacaccacagtcccaccctctctccagtctcccactgatgacccgatcaacagtgaggtttctaaaagtttttaagatttttcgccgtattaaatttttagacaaatatatggagtattaaatatttataaaaataaaaactaattatataatttgtatataatttgcgagatgaattttttaaaccaattaaatgataattgataaatataaatgaaagtgctgcaatagctactgctaaaaattttcgcaactaaggctttgtttagtttcttcctaaaattttttcatgacactatagcactttcgtttgtttgtgataattattgttcaattatggactaactaggcttaaaagattcgtctcgtaaatttcgactaaactatgcaattagttttatttaatactctatacatacatttaaagaatcgattgacaggaaatcttgaaaaagtttttggattttggtcggaaataaacaagccctaaataagacgtgagagacaacttgtcagagtaggcactcgtctccagccgtgccacgtcctcgtgcgattactctattcccgattcgtttcccatgctacgcgtcttctcgtccccgccgcgtactccatccatcatcccgcgccctccgcgctgtgcgcgctcaaactccaacgtctgccagcagtctgccaccgatatatgcctatcccgagccccaaactcactctcactgccacatgccacccgcattgctcagctagtcagctctcctccactctacctccgtcaacgatcgcgctcgcgcctcgtgaatttgctctccgatctgtatagtagcacactacacatcctgtccctatccgtgttgaactgttgatcatacgtggtaatttccatccagcacttcgtcaccatggccatggcgcccgcatggctgtccgctccccgtgccgccctctcccacctcgatggcgtcgtcgtccccgcggccgcgagtcgcttccgctcagaaacggctgcccgtgtggtggccgtcgtgttccggccgaggacgaccgtggtttctgccgcggcgcagaggagcctggtcgcggtggcggcggcgacggcgacggtccctgctgctgctgcgggaggggatgatgaggcaggcaccccgtttgtcgaggagatgcgggcggcggccatgcggctgcactccagggaccaggccagggacgggaggaacgaggcgcccatggagcctcccatcgccaagtggcagcccaccgtcgatggttacctccggttcctcgtcgatagcaagctcgtcttccagacgctcgaggccatcgtccaccgcgccgccgtcccctggtgtgagtatcgtttgcttgtgtgtgaaaagtcatgctttgaaagttgatttattgagattgattgagaaaaaaaaaatacaacttataagacaagcgaacatattctattggcattatagtgatttaggccttgtttaatctacctaaaaaatttcaaattttctcgtcacatagaattttacggcacatatatggaacattaaatataaatgaaataaaaaactaactgcacagtttaactgtaaattacaaaatgaatcttttaatcttagttactctatgattggacaatgtttgccaaataaaaacgaaagtactacaggagctgaaaacaaaaacttttgcgaactgaacaaggccttatttatatagatactcctacgtcttttcagatgccgagttcagggatactggtttggagagatcagagccactcaggaaggatttggaatggttcaggcaacaaggtcacgcgattccagaaccatcagctcctggcattacgtatgcttcgtctctggaagagctgtctgggaaggatcccccggcatttgtttgccatctctacaacgtgtacttgggtcatactgctggaggccgaatcatcggcaaaaaggtgatgatgaattaatattatgtctgaaaccatatgaaatccgtcattatgcttttcctttccaataatcagtacagattgcaaagcagtagtagttgttgtagtatcttaaccgacagatttgtgttctcatctgttcgtcaacaggttggtgagaagatcaatctccagaaagagctggagttttacgagtgggagggtgatctgtcgcagatgcagcagaatgtccgggcgaagcttaaccgagtcgcttccgtaagatcaattctccttgttccgctcggctgttgctgaaacgaatactgtaactttgaataaactgacaataatactgtctcgtgcatgcacttgcctctgttgcagggttggtctcgagcagagaaggaccgctgcctgggcgagatggagaaggcgtttacctgctcaatagacctccgccgccatatgtttatgctcccctgattttgtctatcaatacggtttacatgtctgcttccatgtttagttgttattgtcaataatttaaccctgttgctcaggaaacgtcagatactgtgtgtttcataaaatatgccatagaattgggcaactagcatggagatgattgtatctctttctgctgtctgtaattctggaaattaacagattattatcttcttaatttggatggttaccgcttacctacaaccaaatattgcacattgtcgacacgatcgtactcgtcatcgttggcagagttttctatcgttcactgacacacccaaaagaacagttttttttttgagaaaccggttttatatttctttcataaattttggtgattacagcccatttcttataaggacaccctcgaaagcaaataaaaaatacattctagtccttataaactccttccggtcttcctcgccgccggctgctggagcgcagagcttgaaaccgacttccttcctggcaaagaaacacagtttttttgttgctgtcttgagcagcatatcggatctaatatgtactatgaacactgaacgacccaaccaaagaggatggtcattgaccatcgtatcgccaaccgacagaaactccaacttgtcggacgacaagtaaccctaactttgccagacgacaagtccccctaagggcaattggaccaccaaagcatgtg

SEQ ID NO: 5067 - DNA, 11583 bp, Sorghum bicolor
  misc_feature (777)..(876): n is a, c, g, or t
gcacctttgggtgcaaggtaatacagatccccgatctcactggacgtagggcatcctcagcccgaactagtataaactctctgtgttccacttacatcaccattcaggcttagatagtcatgcatacttatactcgtttatgtctagaccacgagtctaaacgccgacacaaggctttccttgctcttgcaggcgagccaaaacctccctcccacgcgatcaaggttactttaggcccctcccattgatgagctcgcaatccataggaagatgggagaaatggagaacagatagagaaagcaaaagtctttgctttgtcagttgaggccttgtttagttccgaaaatttttgcaaaatcgacactgtagcactttcgtttgtatttgacaaatattgtccaatcatggactaactaggctcaaaagattcgtttcgtcaattccgatcaaactgtgcaattagtttttattttcgtctatatttaatactccatgcatacgtctaaagattcgatgtgacggggaatgtaaaaaattttgcaaaattttcagggaactaaacaaggcctgaggcaaggcgagagagcacgtccttggaccacgttccgataataacattgttcacatgggctgtttttttttcctctccaatcaaaataaattaggagtccagatagatcacattttgtggttccttcactttgaggagtataaaaactagagggagcccaaccaaataaggcgtaaccatgaaatacttgtaaaccaacactatgnnnnnnnnnnnnnnnnnnnnnnnnnnnnnnnnnnnnnnnnnnnnnnnnnnnnnnnnnnnnnnnnnnnnnnnnnnnnnnnnnnnnnnnnnnnnnnnnnnnnctcttaaactgatcatcgtcaaggccttgtttagttcccaaaaaattttgtaaatgttttcagattctccgtcacatcgaatctttagacgcatgcatggagtattaaatatagacgaaaataaaaactaattgcataatttggtcggaattgacgagacgaatcttttgagcctagttagtctatgattggacaatatttgtcaaatacaaacgaaagtgctacagtacctgttttgcaaaattttttagaactaaacaaggcccaagttgtacgggagcattgccaaatagtgccccatttgttttcaattatagttcactttaattttattaaaattaaacctctttaattttagcttagtttatttataaaaaagattcatcacatctaaaacattaaattagcttaattaaattcaacaaatattttgtttttccatttgtttattatattatattccacaaaattctgttaaaataaagaaatttgatttaggataaaaccaactaaataaactatattttagaacaaaataatataataggttttactccctccatcctaaaaatagagtcgctacgggagtcaaactttttaactttgattagatctgtagaaaacgcgtgcaacatttatatctccaaataattttattataaaagtatattcaatgatctaaataatggtattatttatgtaccataaatattaatattttattaaatatatttggtcaaagtttaaatttgctgactttttggaaaacaagaatgactttttttagacagagagatgatgtaataaaactcatagatcttagatactctattcttttgcaaagcaacattgtagacttctaaaggaaatgactttggcggactggagctggtagctaattttgtgattattttttaagtaatttggtacgtaaaggcattaatccattacccgctccgatcaataccattttcggaatttcggtagacccgcaggcccacagctcagagcccacagcctggtaggcacagcccacagatacggacgggtgcgcccccgattccctgtccgccgcagtttttgaagcgaaaaccaaaacggcgagacctgctgtccacgaaatcctcgttctacttgcctcccccgattaccgtcttgttgcgccacagtattggagaatcgagagtgctctcccaggtcgaggtggtgtaggcgctcgcggagcagccgaggcgttggagtttgaggaggagaagatggtcgtgctggtggtggccacgacgtcggacccggcgtccattgggcccgccgccgccttcctcgccatgcccggatggtcccccggcccgcccatcgccgtaagaacagaacagagcctctgtctaagccccatctgtctgatctgatttaatccccatataagtctcgatccggcccatccggttgtgtgttgcgctatctcctattttgcagtaattcgtatgcgtcgaccaccaatattatctgtgtgtgtggagttgcggtgctacttgtcattgtgagttgagattgtgcctaatgctccggatggttttgtttgcggtgtgaaacaggatgcacagtcgtgtagctttaggcaactgtgcaattcgggatgtatgaatgactaccgcgcctataggattttcatgtagccacggatatctaagtaggtatgatgaattttgtctttaatagtacttaacaaagttcttttgggcataggtatcctattttagcagtgtgcaaggcaattttatagcccatgatagaaagataatcagttgttgggatcatggcttcctgacttttactgggcttgtgtgtagtatttttctgaggttgatccaacttgggtgagggaggggaccaagcatattcattcacattttgggcctctttggatccacttgtaatattagttagctggctaatagccacttacaattagctagctaattattagcagggagctgtttggatccacctactaatatgttgctaataggtggttggcacctattacagccccaaacttgctagtgaaactgggcctgtttggataccaagagctaattgttagctggctaaaaattagctaaaattagacctagtccatccaaacaggagggctaatatgccaagtctccaaatagttgttacccaatatgctggccaattttcttgctaatttgggctaacttttagccccaactaataaatagccctagttcatccaaacgggccttaatagttagcaaccccttagctaatacttagttggtctattagcaggtcattttggattcactagtactaattttagctgctaactataagcattagtggatccaaacggacccaaatttatgtactgatcttgactcatgactctattcgctcacgttatcgatgcttgatatcttggactcatgtccctcaaggctgtccctaaaggcatcagcccatgcccttgtgctgggtattgaataaaattagaattggcttcaaaatttgttattttgttcattatactttgtgagcctgtgcattttgagtattattctaacattatttgttctatgagaagtacactggacttgattgcattcctgttttagaaattttatgctcagtgagacagtgatttcatgagttgatgctgcataaaatgcattttctcagtggtattctgagactgaaacctcgggtcatgcattggacgcaaatgcattatgtaccaggcagaaggggatctgaactcatttaagttttgatctatttctttaataatgtgaaaaggaaggcatccaacttatgttagttgatgctctgcatttcagcagttttctaaattcatattttatcatggttctggttccaattaatgtgtgcccatattgttttgtaggaggggatggaaagttttactaatgggaatgttcgattattgaagcatgagcatagcattatcgcagaggatgatcttgaccagcgatggcaggaagccactggagagtctgtttctgaggtcatatttctcagcaaacacactgcagtctccaaacgtccagcactcacagtgcatccaattggtctgttcttctctcatatgtgatcccatttatcccaatggcaaggtcaaatgcttgatttttttttggtttcttgctgaacaccatttgattcatgagatatatcatagatatgcgttcgataaattcgaaaggatattggaccatgttagttatattagttatagcatactggcagtccattgattttgcttggtacacaatccaacaagttctgtaatggccttccatgtatttcttattgttttgtctactagttatagcactatgttttttgagcaacatgcatacacatctgttggtttgttgaaattatcatttcatcaactgtctgttgcttgataatgtacatatgttcttaccggtagacacacatataaaggtgtgccacatctgaaggaggatgaaaccccaccccaaggagggattcctggatgggcagcaattccaagtcctcgcattggcccttggctccggctgatgcaaaagatagctgcagaacaaggcctcgttccagagtttgaggtagtttgctttgcaatagtgacccatgactttctgagtgaactgaactgatctgtaattatgattgtttgtgaagattacgcttgaggctactcaccatggaccagttaccagcacacccaccatgtttgttgagataggtatgtgcttatgtgcatcctttttatttttccgtttcttgcatgtcatcatctaacctgtctttttttgccatggactctcttgaaagttctttttacagtttacagaaaagccctacagttagcttagcaacctctttgacccattaaacgttagtcctgccgtctttacctcctacacgacaccatcctcaactcttattcacattcttcaggcagcgcaatcccgttttgaagttgcaagtgtacatgtatttccataatcaacaggagtctttccaacatattgtttgatttaattggaatcagcagtagtggggtatctgaatgctggaaccatactatacttgtgggtgggatgttattccttttttgtttttttcccttgtcgattttactttgcaagttagtgtatacagtatactacctctagtttaaatttaccttttgacttttattttagttccatgatgtaatttgcccctattgactgtgcaacaattgatccagtttgataccagacgtttctatacaagaacacaaaaatttcaagctcagtcatttacaatgatcatatagtcatgtcctcagaaaaattataaataaaagctacttagtcaacttaagcatgtgaacttttggaaagagatgcttcttataacatggacaggatgaacaagatgcaagcaaccaatattttgtgctctatcttgtggacctttccaaaaggcctttgagtttatgtgaactcaactcactgatgtatttcgcaaaaaaaaaaaaaaaaaaaactcactgatgtaaatatagctccactccagcagatgaattaataggcataatgaatattaggttctatactcccatcgtgtctgctggatctgaattgctaacctcagtattggtctgctataataatgccaggaagtacagaagaccactggggtagacaagatgctgcgcaggcaattgctctagtgagctccctccttccctccctctctgtgtttattacgatgtactccttagttttttcttgtggatttgcacaagcagacggtgtttatttgttgggctgtcaggatcatgtagaatgtggagattcaaaaacaagacatcaaaatttggtgcattcccaatacttaaatgggccacatatcagttggaaagtggaaacttctgtcttgtgccatcagatcatgtaatgtgggccaggatcacatgtgaacctctccagaacataagcacatccttttacaatcttgtttaattgtctatctctgattcctctaagatcttcaacccatatctcttctgcccctcaaatatccaaattctactgctccctccgatttctgatgacgctgttgccctcctccaaatgtgagctcaacctctaatcgttctccaccgacatccatctcctcataatgtggagtgctagctgcactgtgctcttcctacctgtattgtccatcctttgctgctggtgattaacatttttaactaccatgcaccttgtttttgtctaactaaccttcaggagacacaaacatgaatgtgtagtaagtcaagcattatcatgaatctagcacagtgtggtaagaagtatcttttagtacaacaattgtacttgtacaactgctagattaatgtgctcatgttccaatggcacaccttgattactactaagcacatacatgattaactagaaccagtaattatagttgtcgtattgatttggactgagtggtggttgggtgacctgagagaacgattttggatatggggttgagtgagagccaggggcattggctaaatagtaagtgcaaacacattgagaaaaggatgtacctttgtgttgggtctcattatggcccttagttgacaatagaatagtgcagatcatttcaaagtgctagtcttcgacttttttagtctgtccgtctgcaatgctatgattgcgggggatgttagagtatttggtaatcaggattataatctggtattgcatacatgatacatatattgggaggcaactgcccccttcccaactctattatgctgtatatatacctcgagaggctcaatgcagttcatcccatgcatcatacccgatctactatgctttcatggtattatgagtttaggttttgttcttgagccctaaggcttccactgctgatgccgcgcagctgccctcggggagattgatctctgctgggggcggcgctctcgtaggaaggtcacgtagaaccctgctaactagcctcctctccttgtcaggccactcatcgttggcaccgctgggccactgtgaagctcgtcgttatcgttgggccaccaaggcctgccgccatcatcacgatcctctgtgctggtgcaccctgtctaccgattgtcgactctcccaagtacaaggttttcgttgcatacccttgcaagcagtagtgatgacattcatggtcaagccatcttcctggtcgcttcctatccaggatggccccacccatgctgccggtcgtcctactcattctggctctctatccgagtctgtgcctactgctgccacctctgggacatccccatcaatgtcatggatggatgatgtctgagaactcgttgatacatctgatcaaccttgtctaccttcaccattggttgtcccattgtcctgctattgttgttagcaaaaagctggcctctgttgatgctttggacctgcgctttccaccatggcttacgtccatctcgaccttggtacttcggtgagaagaaaagggcatgaactatttgtcggtttctactctgatcataccatatgccatgcaatttcactatgactacgggggatgttagttttcgacttagcgcccgctacaattgcgcgcgcgaaagagggggaggtcgggtatatttagtaatcactaatcaggaatataatccggggaggcaacttgccccccaagtctatagatgctcaatgcgattcatcccacactatacgtctatacccaatcaactaagctttcacaaagtattgaaaagattttcatgtgatatgtgcccaattaaggtagtgctattactgttttatcctttattttgaatgtttgcttttaactgttctcttataatgtgaccttctcaagaaaacatggaattgaattttttcaattcttgcaggttctatggaaagggcttggtctggaggatggagatgctgttggaagttggcaaaggtatgcacatatgattttccttgtatgtaaagtagcattgtggggattttactttatcagtctgtacaaagacaaagtattatcctcaatgaactgtagattgtagaaattggtacttcatgttgctaaaaattaggtcagtatcatgatctatgtagcacagatacagatacgtttatcagtatcaggcgcatacggatacgtggatacagcatttttctaaaagacgatatgcagatacactttagtattttttaataaataaataaataatgaggcatattaaaattctaaaagcagtaacacacttggtggaacttaaaattgccttgcattctcacaattgtgttgttcccagcattgtgcagcatatccatccaattttctcaaagtccaaagttacaaattttaaatgagaacatatgagcgcttagtgcataagtagaacttgttaaagtggatctcaaattaatctcatcccgtgttttctttaccggccaggctctggctgtttttgcataatgcaaaatcttagattccttgtacaccactgttgattgcacacattgcattcacattttgcttgattgttattttatcaatgaaattgtctttgtaaattaaaattaggtgaatttggaaaataccatcacaaaaaccatcttagttgtaaactaccataggtgtttctacgacatttagcgacattgcccacatgccatcctacctcacatcctatggtgttctctacatatgagcatctttgtgatgatatccatttactttgaaatttctttttcttgtaagcatttatttgttgtattcttactccccccttttttcttataagcacatgaaaactcatttctttttatgcaggaactgtgaaaaggttctactaggtataggaggtggtcactatgttcctcgtcacatggatattgtcatgtaagcattgagataatgttattcttgaaagcaatttctaattatccactgtctcccctgtatattttcctttttgtatgttagcacttctaatgttaaaagaccatttttttaacataatggcaggagctctgcccttcaatgaagaagaatagaattagcctagtttataaaggcctatagacgcgcagtttaataaacagaaaaactccctaaaaccagaacactatagccctgacgactaacccacggcaacccacatacacacagaggtaacgcaaaaaacaacagcgagtcagcgaccaccgcatgtcctcattgctgagcttatcacaagcaggaaagagcagctctgactagtaccactgagtgttgacagtcatttgaggaaataaaggcctcagccttccttcattgtcaccacaaggatgtcaattggatccagtatgtgttgtgtgttgatcttcagaggaagaaaccaagaccttcatagcctcctcaaggagctgagagctcagccaagacttggtatgggttcagcttgtctcactggttgtaaacaaacacttttaaccccaaaccacacatatccaatttaactggactgatctggtgcagtttgacaggttgagtgggttggaaccaaaccatgtacaaggctagttaagggagtgttgattgatgctgatgtgggtgtggtcaatcctagttttctatataacctctctggacttgtgcagaatttgtcttgtggtggatcttttgtcagcggaaacattttcgttgttaactgacttgtcattaccaattttctcagatataatttatgcttgttctagtgttctatgaaagggcagaaattagtattttgatgtacacgaggaatacctatattctaactgtctcattttcaaaatatttcagcaaagatggtgtatgggtcggtcatttactctctggctactccttgccaatggacacaccatcacaagtaaatggaaagacttatggagaggttgctggaatgtggaagcatgccatcaaagtttcctacgaagccacaaaggcagcatttcctggtggtgaagttattgcacatcttgatcacaagtaagtgtcctaaccagtttggtgcatctaaaaatctattaaagatgttacttcaatgcattcatattttagcttgtgtagctactgtagttttggattgcaaaatacttgctacgtgcttatcctttgtggtggaagatcctaaagctttgtactccgtgttaactgttttaatatattgaagtccttattaaaaaaggaaccatttaacactctttgcattatgatttatagctttcctatatataaggctctgctttagagctaaaagaatacagttctctacattttcaaggaaaaaatagagctaaaagaataccagtcatgtattaaaaaaaaactagaccaatctaggaggaactagatggtattttattattatcgtattattgtaattatattgtaagaagaaacataggcacccaaattcaccttgatgaggatttggacatcggtggtctgggtatacataagaaacataggcacccaaattcaccttgatgaggatttggacatcggtggtctgggtatacataaacaccttcgaccaactgagctagttcagcttccttgtcatggaaatttcaattgtatatactagaaaaaacattagtcagctgaaatagacatgatatgacttatcctgtttcagttaaatctacctgtactaggttcacgaagggctcttgacatatatgtggaatcttaattaagataatgaaggtttaactttttgtgtcaacgcatacacaacatgttttgtgataataacctttatatatatatatagtttcggctgcagttatgcttgtgcataatattattctattagtgcaactaatctactgattgtatgctacagtcaccctgttctaacgcatcttttggcgtttcctttccaggagcttcaagggctggcagaaaaatgctgtcacatcctttttgcaggagcagaacattaggataggaaagcctagtgatttcttctgatgtactgcaacagtaattgacacgaaatgttgggggaggttgtgaatgcttgagctgatttccctgggcacacgtacgctgagtaaatatgatgaaataagactagagaatacaagtgattcaagagcttgaatttgcccataacatgcatgcattccctgagtgcgcttgtgtttggttatttgtgattttctggtcagagcgtgcgctgcttctgccagaggacgttaaagagctgcaaagagtttaggaatgaaaacaccaaaatacccgcgcagtgcctgatcctttccatactagtaaggttggaccgggctctgctgtaatgcttgcgaagatttgtttcctgacttgctacagagtgcagcctcggttgttgtatcccccaaactagtgaggtaggaccgggctctctgctgtaatgcttgggaagagttgtttcttgattgtgctagaaggtgcagctttagttgcactcctctattcgaaattataagacattttgacttttctagatacggaggttttgctatgtacttagatgcacacaaaggtacatagatgcacacaaagcaatgatctagagaagtgaaaaaatgacttttagtttagaacagagggagtatctcacaattgcca

SEQ ID NO: 5068 - DNA, 3705 bp, Sorghum bicolor
cccttatgaatgcaatctaattagtgctaaactgggagtctatgcatgctgactatggtctatgggtgaggccttgctgcatcgcctccttagtcctcacacaatataataataaaataacaaaaataaaacgtgaaccaagtcatatgatgttgtcaatttattgagggatggatccaacatggaggttgtgggggctcaagccccccccccctaactactaataagttaactaatagggaggagagagaatggaagagcgaagaaaaaaacgagagaaagaagatagggaggaggtgggttggttctagaggaagttctatttattagttgtataaatttttgcaaaatggctacggtagcacttcgtttgtatttcacaattattatttaattatagattaactaggctcaaaagttttgtctagtagattataggaaaattatgtaattagttattttttatctatatttaatgttctatgcttgtgtcgtaggatttgatgtgacgaagaatcttaaaaaaatttgtacaatttttgagaactaaatgccgcttagtctactaggtttggtttcaaagtatcaagtatttcgataaccgatatcgttttttgtttattgttgtaggttgtaagagctctgtctgatgcaatgatcgagtttgttgttgttgttgttgttgttgttggacttggaccgactattactatcgtcatgctggttgtgcttatcatggcaagttgatattgggcgtgttcaactaggtaaaaagctaaagtagtcgtgtgtaccagtgagagggtgataactttttttgcgacaaaaaaaaaatattatatgatagctggtacatcaaatacgctacagatatttttgaattagaaaatagtatctacactatgaaaagcataactcaaaccaaacatgttagatgctttacagtatggatgaccatacatgcaaacattcgtcaaatggcctaaaaacaaatgactaacgaacgatgaccactaggtgaaattaggggatttcttttttctagtgtcgtccttcttctttttgctactgaagagtgagaaagactaatctgagaattattcttcatcgtggctagatctaaccacaaaaaaacggagaagagaccgaagaaaattattctatgccgacgacatcatctctgtcttgatgctgcagtccggaaacaaaagtctctatgtcgtcatattcatgaagatgttgatgccaaagtggtcgcctttatcttcaacggagctgccatttagaagacaatttcatttctccttttcaccgtcgctcggagaggagtaaggccctgtttagttccccacctaaaaattttttatccatccaatcgaatctttggacacatgcatggaacattaaatgtagataaaaaaataaactaattacacagtttagttgagaatcgcgagacgaatcttttaagcctagttactccatgattagccttaagtgctacagtaacccacatatgctaatgatagattagttatgcttaataaatttgtcttgcagtttcctgacgagctatgtaatttgtttttttattagtttctaaaaacctctcccgacatccttccgacacatccgatgtgacatccaaaaaattttcgttcccaatctaaactgaccctaaagagaagataaaactctaatacccaccacccacgagagtgacacctggtacgccacctcagtagcacattttgagagtagccgttgtagcgacatgcctttctcacctcatccgtgtagcttttgaaatggatttttagatgatacgggccaaatggtttccaagaaacttcacgcagcggattagcgtaaatctggattattagtagtaaacaaatttgaccctatagactgacggaaagcaggtgagcgagtccggactccggaccctcccgttcctttataatagagcagcgtgcgcgactgcaggtggtggccacaggctctggtagcacgacacggtcccccccacaaccaccacccggcccaacgcctccaacgacctccgtcctccgcccaaaatactccgctcgctctccctgttcctgtttctcggtgttgccccctcggctcggccctcgtcggcggactctgctgctcctcatggcgccgtcctcctcctccccgtcctcgttgtcgtcgtcgggcggctcccacgcgggcctcgccatcgcggccaccgccatggcgctctccggcacgctcgtcctctactccctgtgccgcgccaagcagccgcacctggtcccctccgacgccgccccgtcccctcgtctccgcccgtgcctcgcctcgtccggtaagtgcgcgcgcgccgtctgttctgtccttctcggttccttcccctgccgcggcgcggcgcgccggactgccggccggggtgggcgtttacttgctgttgctgttgctggagagtgcccccccccctcccctaacggcgggagtacgtttcccgtgcgtgcagacaagcggaagaagaagaagcgggagatggcgcggcgagggaagagccagcagaagcgggtgcgcttcgcggacgacgtcgtggacaccaaggacaatggcgccgccaacgccgctgccgccggggcggcgcgggaggaggcggaggcggaggccgagccgtcgtgctgtaccgcggcgctgaggacgacgcccatgccggccaaccgggaggcgctgtaccgcggcatgctccgcggccggtccatgctcagggtcacctgctcctactagctaagctagcagggtagcagtagcaccacctgccggcggccccccgacgtaaccactccatcatccattaatctagacctctccgacctccagcaagcttgctcctctccgtgtctcttctctactcttgtgtgcgcgtgctgtgctgtgctgccaactagtggcggcgctgctaattagttgcccggaattaattaatcgggcctagatagctccctccctcgcccatttgtttgctgggaaagttttgtaattagtggccgtccccgcgaggcgagggagctgatccgtgcgtgctttactgttgatgctgtgttgcttgtatgtatggtagcttctttgcttgtactacattagtgttgtactgagtgatgatgatcagtgaaacgattcttcactgttccaagctaaccatctttctttcactcgtacagagactctcttcatctctatccatctaaaaaaaagaaaaaaaaagaaagaaagaaaaaaatatattttcttggcaagcagttggttggccgatagctagatctttttcgtccggactgatgaggaggtgccctgccggaattggtttctccggcgccgtgtcgccgggcaacgacgatcaggcgttgctgtatctgtcgggcacgggctttgcctttgtttctgtggaggcgatacgataccgtcgggactcatggctgtgggagctcgagcgcgactatacgccggccgctgccggcggactcgtcgatcgggatcagagttctctagaggagctttctgacgcgctcctcccctccactccacctgcgaacgaccccggtccagccagcgcgtgcggcgtgtcggccgtgacccgtcgtgagctgctgcgtcgccgtccgccgcgggaaggcatccccaaggctccacccaaca

SEQ ID NO: 5069 - DNA, 4257 bp, Sorghum bicolor; identical to SEQ ID NO: 3494

SEQ ID NO: 5070 - DNA, 4076 bp, Sorghum bicolor
tctagtgttattagttgtatcttataaatattaatattttttatataaaaataatcaaagttattccttagaaagtgaggaagacagatatatggacggagggagtatttgggtgactgctaaagctcaccacatcacgcaactttcttgctaaaagtaaggccttgcctagttctgggtgaaaagtttttaaaaattatagtacttttgtttgtattgggtaattattatctaataataaactaactagacttaaaaattcgtcacataaattataggtaaattgtgtagttaattattttttatttatatttaatgttctatgtatgtgccgtaagatttaatgtgacaaaaaatcttaaaaagtttttagattttatgtgtaagagcaactccaacagttttgcaaattttatttggcaaatgttgttatttaccaactcccaaaatgatatggagagggaacaaaaagggcatctcaaatgtttgacaattttgacttttggcaaaaaaaatctatggtttcagagatcaacgaagaagaatcaggttgtcagcttgctataaaagcgcgcgcatgcagaatgccaagtctattccagacgtgcataaaatgccaataaaggaggagaatttgccaatttgctataaatgtcaagtccaattgccaaactgttggataagagattttgagagttttgacaaaaaaaaaagaatgccaaacctatttgcaaaaaaagttggagttgggccttgtttagatccgatttttttttctaaattttgacaccctaaaccctaaaccctaaattttgacactgtagcactttcgtttttatttgacaaacattgtcaaatcatagagtaactaggattaaaagattcgtctcgtgatttacaggtaaactgtacaattagtttttgtttttatctatatttaatactccatgcatgtaccgtaagattcgatgtgacggagaatcttgaattttttttgatttttgaggtgaactagacaaggccttggcataagccccgtttggttcattacttgtttaacgctctccctgaggccttgtttacttcacctccaaaaccaaaaactttttaagattgctcgttacatcaaaacttacggcatatgcatagagtattaaatatagatgaaagcaaaaactaattgcacagtttatcaataaatcgcgatatgaatcttttaaacctacttactttatgattggacaatgtttgtcaaataaaaacgaaaatactacagtgtcgaaattcaaaaaattttcagatctaaacaacgccttaatgtgtggctgactttttttttacaacaaccaaacttaaatttattaaccacagcaagcaagtgttaaaatagtgacaaactacgtagagtagagcctgaataagtgaacatatagatccacaatgggacctagtacaacggcaatcttgggtaacaggaggggtgttttgggtttgtttaggccttgtttagttcccaaaaaattttgcaaaatttttcagattccccgtcacatcgaatctttagatgcatgcatgaagtattaaatatagacgaaaataaaaactaattgcacagtttgatcggaattgacgagacgaatcttttaagcctagttagtccatgattggacaatatttatcaaatacaaacgaaaatgctacagtacccattttgcaaaattttttgcaactaaacaaggccagccaaaatatctgctgttggttttgtcttctgttcatcaacaagagttgggcatctagggtggctgctacgttggaataaccctgtgtaaaaggtttagcagcaacaaaccggtctgtggtgccgcctgcaatgcaaggcgtcggccaaacagagaccgaaacattacctccagaaaccctcaacggtagtgcaggtcgctttctcccccaaattttgaacgccaaaccctagctctgcttctcagtgccccgtctccatggacatcggcggcagcggcggcatcgcatcgtcgccggggacggtggacgacaagtttgcgcggaggcgctcccgccgcgtgagcttcgcggacaccaccgcggtgcacgtgttcgaccgcgacgaggacttcgagacgccccccgaggagcgcgagcccggctccacctctccctccccgtctcccgggaggtcctcggctggccgggaggatgaggacgacacgggggaggatttccaccgccccccggtcaacttcctccaggacgtcgactcgtcgtccccaggcagcgccgccggatccatggcctccgtcgatggtgaggtcctttgtttgtttcgaaataaaaaaaatatccgtgaattggatggttgattttgttgcgactcccacatagtttgcttcctacagtcaatggggaattttactttatttaggccggagcttatttctgatgctcaggttgttgcatttgtcaactgaattatgtcagcttagctgttcagagatgccatacttctctttgtgttggatccagatgttgatgttagatgtgctgtgccgtacttttgataccgtgggcaaatttattgtgctgactgctgaattgtgaatatagatgctatatatatagatttaaagtgtagatggcgtattgattgcacaatgcatcaagctagcagtcattcttgtattgtttgctcagtaaaatctttaaaacaaagcaatgtcaatggatttgaagttgcttgtggattcatttttttttcggatttagaaattagaaagtagaatatcactatatggcatgggttgtcttgcttttgcgtgtccatgcttctagtgtgagtgtgtgacccttctattcttttatattagttatatatgctaaccatatgccatattactttgtggaaaagcctgtcttctcactatgcccattcctacgacagatgaaaacttctttggacctgtatcggcaagcttcattcaaacaggaagaccatcggattctggaatgtcagaggatgacaaccatgatataactatggattccaggacgttctctttgtattttcgcaatattgctccaccagatgactgtacagccaactcagctgcgagtctaatgacacctaatactgcatctgagggacccctgaaggaacttactgcatctaatcctgcaacaacatcaatcaattgtcgggatacattgactgacatgagtttgttgagtggtagccgcagaacttatgattatgataagctgtcacccacgttgaggagtatgatgaagaagataaaagggagccagcaagcaagctctcataaagttggtgtttctgatgtacctcttgattgtgttttaaccttgtctacatctgagaaagaaagtagggaagaaaatttatgcattgacaatggtatatcttctgataatctgggcatagttaatacgactgtagagcacgcttctggtcgaaatccagtttcgaccagcacagatctgattcaagaagataatgaaatgataattgatggccatgagaattcacaggttatgtactgatccttttcttttacatgtttgtttgagccaagcagctcatgtattatattatcatttatactaatttggtatcaaactctttgatgtgttttaggtatacattagaacctgcaattaactgcagcacctaaacactttctcatatatctaaacctacatgttggaaggatcctagagaaactagtataggaggcactaacatccttgatagctgtagtcaaacacagttgtctacacgttgtttttttttctctcgaacatgtgggagagctgcatatatttatattaataagagagtgaaggggtaaagaagtccaaaacaaggcccccacccctttaaggtcggggggtttttaaaaacttttgggctttgggaaaaaaaaaaaatttttccccccggcccgggaaaaaccccctacccaaaattttttcccccctttcttaagggcagttagaaagaaattttttttggaaacaattaccccccttccccccccccc

SEQ ID NO: 5071 - DNA, 3407 bp, Sorghum bicolor
  misc_feature (1)..(1854): n is a, c, g, or t
nnnnnnnnnnnnnnnnnnnnnnnnnnnnnnnnnnnnnnnnnnnnnnnnnnnnnnnnnnnnnnnnnnnnnnnnnnnnnnnnnnnnnnnnnnnnnnnnnnnnnnnnnnnnnnnnnnnnnnnnnnnnnnnnnnnnnnnnnnnnnnnnnnnnnnnnnnnnnnnnnnnnnnnnnnnnnnnnnnnnnnnnnnnnnnnnnnnnnnnnnnnnnnnnnnnnnnnnnnnnnnnnnnnnnnnnnnnnnnnnnnnnnnnnnnnnnnnnnnnnnnnnnnnnnnnnnnnnnnnnnnnnnnnnnnnnnnnnnnnnnnnnnnnnnnnnnnnnnnnnnnnnnnnnnnnnnnnnnnnnnnnnnnnnnnnnnnnnnnnnnnnnnnnnnnnnnnnnnnnnnnnnnnnnnnnnnnnnnnnnnnnnnnnnnnnnnnnnnnnnnnnnnnnnnnnnnnnnnnnnnnnnnnnnnnnnnnnnnnnnnnnnnnnnnnnnnnnnnnnnnnnnnnnnnnnnnnnnnnnnnnnnnnnnnnnnnnnnnnnnnnnnnnnnnnnnnnnnnnnnnnnnnnnnnnnnnnnnnnnnnnnnnnnnnnnnnnnnnnnnnnnnnnnnnnnnnnnnnnnnnnnnnnnnnnnnnnnnnnnnnnnnnnnnnnnnnnnnnnnnnnnnnnnnnnnnnnnnnnnnnnnnnnnnnnnnnnnnnnnnnnnnnnnnnnnnnnnnnnnnnnnnnnnnnnnnnnnnnnnnnnnnnnnnnnnnnnnnnnnnnnnnnnnnnnnnnnnnnnnnnnnnnnnnnnnnnnnnnnnnnnnnnnnnnnnnnnnnnnnnnnnnnnnnnnnnnnnnnnnnnnnnnnnnnnnnnnnnnnnnnnnnnnnnnnnnnnnnnnnnnnnnnnnnnnnnnnnnnnnnnnnnnnnnnnnnnnnnnnnnnnnnnnnnnnnnnnnnnnnnnnnnnnnnnnnnnnnnnnnnnnnnnnnnnnnnnnnnnnnnnnnnnnnnnnnnnnnnnnnnnnnnnnnnnnnnnnnnnnnnnnnnnnnnnnnnnnnnnnnnnnnnnnnnnnnnnnnnnnnnnnnnnnnnnnnnnnnnnnnnnnnnnnnnnnnnnnnnnnnnnnnnnnnnnnnnnnnnnnnnnnnnnnnnnnnnnnnnnnnnnnnnnnnnnnnnnnnnnnnnnnnnnnnnnnnnnnnnnnnnnnnnnnnnnnnnnnnnnnnnnnnnnnnnnnnnnnnnnnnnnnnnnnnnnnnnnnnnnnnnnnnnnnnnnnnnnnnnnnnnnnnnnnnnnnnnnnnnnnnnnnnnnnnnnnnnnnnnnnnnnnnnnnnnnnnnnnnnnnnnnnnnnnnnnnnnnnnnnnnnnnnnnnnnnnnnnnnnnnnnnnnnnnnnnnnnnnnnnnnnnnnnnnnnnnnnnnnnnnnnnnnnnnnnnnnnnnnnnnnnnnnnnnnnnnnnnnnnnnnnnnnnnnnnnnnnnnnnnnnnnnnnnnnnnnnnnnnnnnnnnnnnnnnnnnnnnnnnnnnnnnnnnnnnnnnnnnnnnnnnnnnnnnnnnnnnnnnnnnnnnnnnnnnnnnnnnnnnnnnnnnnnnnnnnnnnnnnnnnnnnnnnnnnnnnnnnnnnnnnnnnnnnnnnnnnnnnnnnnnnnnnnnnnnnnnnnnnnnnnnnnnnnnnnnnnnnnnnnnnnnnnnnnnnnnnnnnnnnnnnnnnnnnnnnnnnnnnnnnnnnnnnnnnnnnnnnnnnnnnnnnnnnnnnnnnnnnnnnnnnnnnnnnnnnnnnnnnnnnnnnnnnnnnnnnnnnnnnnnnnnnnnnnnnnnnnnnnnnnnnnnnnnnnnnnnnnnnnnnnnnnnnnnnnnnnnnnnnnnnnnnnnnnnnnnnnnnnnnnnnnnnnnnnnnnnnnnaagttgggcgcctccggcgacggcaagaaggacagcacgaaggctgtgcaggaggcatggacgtcggcgtgcggcggcaccgggaagcagacgatcctcatccctaagggcgactacctcgtcggaccactcaacttcaccggcccggggacagccccaacacggacggcatccacatgggcgactcgtccggggtcaccatcgagaacaccgtcatcggcgtcggcgacgactgcatctccatcggccccgggacaaccaaggtgaacatcaccggcgtcacatgcggccccggccatggcatcagcatcggcagcctggggcggtacaaggacgagaaggacgtcacggacatcaacgtgaaggactgtacgctgaagaagacgagcaacggcctccggatcaaggcgtacgaggacgccgcctccgtgctcaccgcctccaagatccactatgagaacatcaagatggaggactcgtcgaaccccattatcatcgacatgaagtactgccctaacaaaatctgcaccgccagcggcgcctccaaggtcaccgtcaaggacgtctccttcaagaacgtcaccggcacctccgccagccccgaggccgtcagcctgctctgctccgacaagatcccctgcactggcgtcaccatggataacgtcaaggtcgaatacagtggcaaaaacaacaagaccatggccgtatgccaaaacgccaagggcagcgccacaggctgcctcaaggagctcgcatgcttctagacctccatccacccatctcgctctttacttagttatttctctcgtccatccattggtgccatccattggtaacgaactagtaccatccattggtttatttcttcatattctttctctcttcacacatcgagcaacattatgtttccttttttgacacaggaatgtacgtaaaagcacctatcttgcatgtacccgacctctaggacatgccttttttttggctagcacaacatagcagtgtcaaaactaatcttcaatttcagcattcgttcaaaaaaacttcaatttcaccaaatctctctatacgacatatcatttttattggcaagcacgacatacactcccggtacacccttaaaaatcacttggaacgattatagcaagtacttttacaacattaattatttttaacgttttaccaaagccctacctttatatccgaaaaaatctttttattatgattctattgtttgcatactgtgtattattctgtgttgtttgatgacagctttactacatggtcttttttatattgttgtgagaaaagcaaaatttgatactctaatgtcgattattgtgtttgatctagtttccttcggcgggggtgagtatgggctatcttggtaggatcatcggcgctgagtgagggttcacgttaggagatatttggcggggtgagtatgggctatgttggagagcagttttttcaatcttgcttgggttttagaaacgctgggagatgctcttatcccgctctccaatactttcctacaagaactttctaaaaca

SEQ ID NO: 5072 - DNA, 7121 bp, Sorghum bicolor
agacatgtgctgtgctgggagcctgggacggcttgtccagcctcttcttctcccttggtggcttcactggcccatgttgctatggaggaagctagggttgctggacaaattttgttattgattagatgaagtttgcgagcactagctaactcacgtactacagcctagccaccatcctccgacgaaggtggcatagtgtgtccctgtcctccaatgtccatgtggggcacgacatcgacaggtggtccaaaggccaaagccacgacgagagggcacggggcgtcggggccgtctggacccgtagcacggacacttgggtcttgtttagttcctaaatttttttaacacttttgtttttatttagtaattattgttcaattataaaataattaggcttaaaaaatttatcttgcgatttacagacaaactatatagactctcccaaaaacgacaccttttccacgtgagcttcgttgttgctcccgaggtcaccattgagaattgatagttctatattctcaagttgatggcatgttgaggatgtaggggatgttcaatgtggagtagtggcctcaatagtcgcttggcctagcatttgaactagcgtacctgttgtgttaggataggaaggcttaacatttgttgaggccaaggagagtataagcagagatgaaagcggtaaggatattttttgaccatattcgagaccgaattcgtttagagagatttatatatatctgtatctgagtccgaatattcaacatacgataccgtacccgtatccgaatacttaaatcgtatatttatgatgttgatatttaattctattttatccgacatggttgatattattcgtattcgaatccaaatctgactagaaatatgaaaacaaatatgatattcatgatatccgcctgtatcctatccgttttcatccctaagcataagtgagttagattccccactggcaacgtgagtcgttgagcaacatgaaacggagctcaatggggttccttagctgcagcaatctctatttggagctgtattttttctgttagccaacagtatttttctctcacaatgaatcagcgaacaatacttctagttaattgcggacttttgaatgttgtcgccactttcactagggccactagggcaatctccttgggcttgtgatgttggtctcctaaactctttggttgatgtggccgtggcttcattgctggtaagtttgagacggaggggcgtgtcgtgcaactaattcaacctgtcatcatgtgattgcataccagctatcatcttctatagttcactcagcctgaccaactgtcatttgacgctaaagctatcttcagccatgtcacttgttctgaagcacaagattctcccacgagcttcatccatttttcatcattggattcttacaacttttgtaactgtccactaagcaacaaaaagaattcactacacaagctttgtatctttgcgtcgagcatcttcttgatttcatgctgaaaataattagcatataaatgctgaactgcagggtgcagatgctctgtgcggcaattgagccggtctttgccgtacctgctcccaccgtagtctagtactttgctctaatgtgcaggtcaaggcatctgctgcaaaatgcaaccacttgtctctaacacattaaattagtagtaaaacttcacactattatatatccatagctatctatggccttgtttaaatggcgaaggtttttggattttaacactgtagcactttcatttttaattgataaacattgtccaatcatagagtaactaggcttaaaagattcgtctcgcgatttacagacaaactatgcaattattttttattttcatttatatttaatgctctatgcatttgtcgtacgattcgatatgacgaagaatcttaaaaaaattttagtttttttggtaaactaaacaacgcccatatagggagtagaatgatgtgataagataagcagcagctagctagctagagctcgctggtcaactctgggcaggcagagaggaagtcaccatggaagtggccacatcacgagaactcatcaaccccacagccttccccattctcgtcctcgttgccggcctcaccaccgttttctacgtgctccgccgccggtgcagcggcaatggcggccttcgcctccctccgagcccgttggcgctgcccgtcctgggccatttccacctccttgccccgctcccccaccaggcgctgcaccggctggcgtcccggcacggcccgctcctgtacctccgcctcggctccatgccggccatcgccgcctgctccccggacgccgcccgcgaggtgctcaagacccacgaggcggcgttcctcgaccgcgccatgcccacggcggttcaccgcctgatgtacggcgggcaggacttcatcttctcggcgtacgggccctactggcgcttcatgaagcgcgcgtgcgtgcacgagctcctggacggccgcacgctggaacggctccgccatgtgcgccgcgaggaggtgtcccgcctcgtgcgctccctgtcccgcagcgccggcgacgacggcgcggccgtcgacgtggacgccgtgctgatgggcgtcacgggcgacatcgtctcgcggatggtgatgagccggcggtggaccggggacgacagcgccaccgacaccgaggagatgaggagcgtgatcgccgagaccgccgtgctgacgggcacgttcaacctgcaggactacatcggcgtgttcaagtattgggacatgcagggcctggggaagcgcatcgacgcggtgcaccgcaagttcgacgccatgatggagcggatactgacggcgagggatgcccagagacggcggcggcggaaggagccggcggacggcgccggcgagggggccaagaaggacctgcttgacatgctctttgacatgcacgaggacgaagccgccgagatgcggctcaccagagataacatcaaggccttcatgctggtacgtcgtccatccatgttcttttttactcctagatataatagttagtactactcatcatgtagtatatgtactagtatgcatatatatgcattattatatactattatattatttagtgcaaaaatattgtgtacgagtagctagctgttctagattgtgattgtaggaaactaattcctacaatgtacttcgtggatggaaacaaggaggagaaaaaagattcttttaaattaagatcttgtttggatgtagtcaaattcgtatagatccatatatgttatggtcaaagtttaaagtaccgggttattgaaaattgcagcaattctctttcactagctatagtggagctatgacagatagtgtttttataaaaagaaatacataaaaaacactagtaattgataaaaaaacatgacaatgaatttcgatgaatacaaatatatttctataagtctagataatattactaatactaaatggcattacaacatggttcataaaaagcttaattgtccataatactaaattagtagcaaataataactagtctaaaatttgttaaagcggcgctatagcatgtaacagtgacaaaagttgtgcaaatatacgaatagcttaggccttgtttagatacatctaaaaacccaaaactttacaagattccctatcacatcgaatcttacggcacatgcatagaacattaaatatagataaaaaggataactaattacacagtttatctgtaaatcacgagatgaatcttttaagcctagttacttcatgattatataatatttgtcaaataaaaataaaagtactacagtgttaaaattcaaaaagtttttggatctaaacaaggccagcggcaaacctgtccagctactatagcacgctatttttttctttggttgagatggattgagtgaaatttgacttcaatccacccgtgcattgaggtgttatgatttcataaaatttgctcacgttttgactcatatcatcctactactaaaaagggcgaaagcaaatcgttcacccgcctgttcgctcgctcgccccggctgcctcctctgtacaacctgtgttgcctgctaccgctgctgctctactgctggaggcctgctgctgcctcctagcgcctagcatggtggtgcttaggcctgctgcataaggcctagcaacatgatgggtgataggaaaaatcacgcgtctcaggcccggtttagattggagacaaaaaaaatttttaggtgtcatatcgaatatgtcggaagaatgtcgggagggatttttagaaactaataaaaaaacaaattacatagctcgtgcaagacaaatctattaagcataattaatctgtgattagcacatgtgggttactgtagcacttaaggctaatcatggattaactaggattaactgtgtaattagtttattttttatctacatttaatatttcatacatgtgtccaaagattcgatgggatggataaaaattttttgggtgaggaactaaacagcaaatctatactcccatgcattatgcaggtgctgattctcatgcactctaactcatgggcacacacccattaaggcattgtttagtttctaagaccaaaaattattgtccaatcataaactaattaagcttaaaagatttatctcgtaaatgacatataaagtatataattagttttttattttatttatattcaatattttatatgccacaagattcgatatgttggaaaatcttaaaataagtctcgcaaattacagacaaagtatataattagttttttattttatttatattcaatgttttatatgccgcaagattcgatatgatgagaaatcttaaaataaattagatttaagagtgaactaaacaaggccctagatctatttttttattttaacactatagcacttttgtatttaataattattgttcaaccatggactaactaggctcaaaagattcgtctcgcaaattataggtaactgtgcaattagttatttttttatctatattcaaggctccatgcatgtgtgtgaaggggaatcttgaaaaaaatttggattttgggatgaactaaacaaggccttaggcctggtttaggttcaaagttttaacacttcgttcaaaaagttttggactaattaggctccaaaaatccgtttcgcaaattacagacaaactatataattagttattcttttatctatacaaatattgtctaatcatgaactaattaggctcaaaatattcgtcttataaattacagacaaactatgcaaaattattattttaatctatatttaatgctctacatgtgtaacttgttcttaaagacttactccctccatacccataaaacaagtcattttggacaaggtttaggttaaacattgggaatataaattatgaataacttttaagtcgttgagttgaaaatataaaaaccatatgaatagatttgtgttgaaaaatatttttataccactttttgataaatatttttttataaaagtaacaagttaaagttagactttgaagaccgtgccattatctaaaacgacttattttatgggtatgaatggagtatgtaatattatatttatatttaattatcacagttgcaatataggttcttacattatagataatcaaagttgatgttttagttttccattcaaaattagagttaactatctatcttttttgaattctctgaaggaaatgttatcacggtattttatgttcccgttgcaacgcataggtatttatctagtaaatataaactctcgcaggacatcttcggggccggcacggacacgacggcgatcacgctagaatgggcgctgtcagagttgatcaacaacccggacatcctccggcgggcgcaggcggagctggacgccatcgtgggcgcgtcccggctggccgacgagtcggacatcccacggctcccctacctacaggccatcgccaaggagaccctgcgcctgcacccggcgttcccgctggtcgtgcgccgctccacggagccctgcaaggtgtccgggtacgacgtgccggctgggtcgacggtgttcgtgaacgtgtgggcgatcgggcgcgacccggcgtgctgggcgccggatccgctggcgttccggccggagcggttcctggagggtggtgaagggagaggagatagcgcggggctggacgtgcgcgggcagcacttccacctgctgccgttcgggtccgggcggcggatttgccccggcgcgtcgctggccatgctcgtggtgcaggcggcgctggcggccatgctgcaatgcttcgagtgggcgcccgtcggcggcgcaaccgtggacatggaggaggggccagggctcacgctcccgcgaaagcgcccgctcgtctgcaccgtcaaggccaggctccacccagtgccggttcccactgccgctgctgctgataatggcgtggacggaactctccattgtgcatgaccagttccaggaacatatgaagtcttatgtgtaacactaataacttcaaacattatctgcatcatgtgctcgtgctcaagtactgaagttttggaagttactcaactggcatagctgaaacataaatgagaacaattagaggaccacaaaacataacaactagagagttgtgtacagaatacaaaatgatgactactccttgcattttgctttgcccaccaatcttcactagcagaaatacatctggtcataggatcccttcccaaaccagtggctctcatgttcaatgtcttctgttgtgaatatttcttcttcagtacatcacatatgttctttatttggtcttgggtgtatgacctcatttttcggtcaaagaacttctttaataaatcaacataacccacactatttaagcaatgttgtggcctgttatgggcaagcacttcttctatgcacatttcattgagaactttggtggcaaaaggatcccattttgctgcaacctttgttgttttttcccatcataaagagaaacaaatttgaatttgtagcagcaatagaaggcaactctaagaccactgaggtctaccgagaatact

SEQ ID NO: 5073 - DNA, 2605 bp, Sorghum bicolor
gccctgaacaggtaccgttccatgtatgattagtcattgaagatatgctggtgtagtaatcattgtttttttgttcatagtagattggttatgtatcagggcgaagtcatgttgaatttgcgtggtgcactggcaccagacaagaaaaaaatatttaatactccctcgagtccattccaaattataagcaattccaaaaatcttggaaagttaaaacatttcaagtttgaccaaatttatatgataacataataatatttatgataccaacttagtattattaggttcttcattagttatattttcatagtatatctatttgatgtcataaatctttgtaattttttcaaatagatagttttagatttgttagtttctatttcagacaaacaaatttttttttttaagattaaggataaggaaaatgtttctagcctaccccattcatgagtgaatgagtacaacctaaactaacaaaatctttataaagcttatagtatatgctgtggcactctactactacatacacagtaaaaagagttgattatgttggaaccacaagtacatttctatcattaatgatattgttatgcaatcattttgtggtgaatgtattaaggtggagaccatatctattttttggacgtagctggctgtagcatttatattttcccaactcatatagacatggatcatttatctttcaatttctgataacatgctaatttgacactgccttattctgcagcttgctgatccatctgagaaaacgaagtctgatactgacaagaatatgtctattatatttgatctcctgaggaggaagaaaaatgcaaggctggaacaccttattttaaacaggacatcatttgcccaaacagtggagaacatatttgccttgtcattccttgtgaaagatggaagagttcaaatcaaagtcaatgacgagggacatcattttgtctgtaagactgttgcctagttgcttctatgctgcaatatcattgttattcacttgttctatacttatagactccagtgtgcctgatttaactctattgattgtgacagatccaaggaatgcacctgcagctagtgatgttgcctcaggaaatgtggtctatagccactttgtcttccgatttgatttcaaagactggaaggtattgtttcagtatctttcaaagaaacaatttgtcatggtctagcagatgtcatgggcagttggctgacaattgaattatcatcacagaataaaattatgcacattcatcttagatagttgattcatcatttagtgtggccatgtttttttttcccttaaaatattccacttgcacaagttgcaaaactgtatcaagtttacatcgaactttaaaatttgtttatttgtatgtagaagtaattttggttatttttctgcagaaagcattgtatgcctgattgtctgattagtggctactgtataacttgtgttattcttttgttgaaagaaaacttgcattgtaatatgatttgtcttccttccattccagctcatgaaaggagttgttccagagggggaagagcttatgccgcacaggtcctctgagaccatagccaacacaggaggaaatcatactgaggccaaggagcccttggccacaccaagcacaacaattaggaaactctgcaggaaccggggcctggtctcgcaagatgagatggttgcgataggtgtacatggagtcatggaaaatgagacgggagccatgggcgcgaacggggccatggatgatgaggtggtagctgccatgggtgcgaaggaagctgcgggagtggcaactggagcggaggaagtcatgggagacaagatggtaatggagcggaaggacgtgaagctgacgtacaagcgcaggcgtctgttccaggacgcctgatgccctgatccagctgatcgaggctggtggtgtacatgtctaggtactaggtagagaactagagatgccaaccctgctcacttcagcttagcttaccttagatgcatttgggtaaagcacccccactgggcatgggtcgtggtggcttttggaattgtttgggcgccacattgttttggaggtgtttttagtgttagtttttgacgtacttaggcccgaagtaaccagtcaagaactcaagatgctggatgcttcggttgacttgcagtgctgatgcttagttatgtcggttgaacaagttcgctaatcgctactagtctggtgctcgtgctgtgaacttctaaaggtgctcgtgctgtgaacttctaaaggtgctcgtgctgtgaacttctaaaagatgctctgttctcgaaccgatggtttgagaacttgacccattcgtctgcgtcgtatcgtctgcaccatgtttcgtctttgattttgcggtgttctatgcatgctgatgaagcatataagcagaactgaggattgttttgtcgatggaaactttgatttgcggctgttctactgcatgctgaactgaagcttgtttgttcgatggaaacagacgcatctgctgctacatgacgtgcttcgtcgatggatacagatcataaagcatatcagcagaactgaggcttgtttcg

SEQ ID NO: 5074 - DNA, 3193 bp, Sorghum bicolor
attttttttataataaatcagtaaacaatacttttaaactcgaaagactacactaatttatacgaagttacggatcgcaagacaggatcgagcgtcctgttccgcccctccaagttcccatgctgccaaaaccaaagaaacccatcctttacaaaatataaggattgttggtttcaaaaaaaataataataaggattgtttgttccgttgtcctcgccatggcctcctctgctggggcagaatcctactccctgtgtccataaaccatagaacattaaattaaatatagatgaaaataaaaactaattgtataatttacctgtaaatcgcgagacgaatcttttaaatctagttactttataattagataatatttattaaataaaaacaaaaatgctacggtgtcaaaaaaaaaaaatctaaacaaggccttatcccttaagcgagcacacagcctcgcaagtgatttacagcccaacctaggactagccagccactagtgcagatgcaacgccaaatggtatcatcatgacataaaccactacctgagatggacgatcgagatgcgaatcctgggcatgcatgcatcctttggttccttttctaggcaccccccactccgcgtactacatgcgccgcacggcacccgcgttccgtcgcgaaaaacacaggggaatctcactcactgtaacaagaaacagttctgcggttttgagcggggttcgttcgtgctcgtgcatgaccgtgcccgtgactcacccctgcccccaccaccaccacccacgcggacgggacggaccacggacgcggtcgtgcctgccgtaacgaacaagtcctgctcctgcggggcgcggcctcctggtcattatccaaactgcgtgcggctgacggcgggcgggctcggaggttttgctgcccacgcgccggccagccgctggttttgccttgttttgtcgtctttccttctcgactttgcgacttggacccctgtggatgtggtgttttgctgtgaggtctggggggctaaggtttttgatttcttggagcagaggtaacaaggctcgttttcggatggttttcaacctatactagtagagcgtttctgtgggtgcatgggatggtttagagttgacttcttcaagctagtagagaagttgagaggggctttgaggtttagcaatgctccctcatatatcaaattatgagttattactgtacctgttagacatagcatatacggatttttggtatataacaaacattatgtacgtagaaatatcaaaatgatttatagtttagaacataggctacttcttttagaagatcctcagggaatgaactgtcccgaccttaatttcattaccactaaaaacgatgattatagttacattgttataccttatgtccagagttacaaaaaggtgagaaacacagcacaaacaacaccatatacaaagagaacaacacatcgctaataacaatcacaaaaccgacaaacctacaactaataatagatagaggctcatcactccacctttttaagaaaaaaattcatttctataagcctaactttttcttttagcggtgcgtcttttttcttaacgtaatttttagctgtagatttataagtcttagtaacgccatatttttcttttagtggtaggtgttactaatgccatatacggtgtatatcgtaggtgtgtattagttcacatgacgactgaatattacttgtgcccacataagatgggtgaaaagaaaaatggctgcctatgattcctggaaaggaggaacaaaaacccggttgccgtaacacatccaaaatagcacaggaaccaagggcgttaagtgctaaaatgacagaaacattccaattcacgtcaaccttttcccctcctccacttccggccgctcctctataaaacacaggctccttttggtcaactcctctccattccaaactccaaacaattcagcccccgtgtccacccaaacttttgatgggatcaggcctctcaagcagccaccggagaagcagcgcgtcgcttcaccagccgccggcgacgtcgccgtcgccgtcgtcgtcgccgccggcggcccctccggcgctggtcatcgcggccgacggctcgctgagggagttcacgccccctgcagtctccgtctccgacgcgctcgcgctcgcgctcgtcggcgccgccaatgccgacggccgccgcagcttcttcgtgtgcagcgccgacgcgctctacttcgacgccgacgtcccggcgctcggcgccgacgagctgctccgcccggggcagatgtacttcgtcctccccgcgccgatgctcggcaggccgctctcggccgccgacatggccgcgctcgccgtgcgcgcgagccaggcgctggctgcggctgcggctgcgactgcgacagcgggcccgcgtagtggtgggcacggacgacgacgccctcgcggccgcggcgggttcgcgaagacgcgcgtcgtgccggcgcaggcgcaccaccacgcgcacggcggcgacgaaggggtcaacgagaagctgaaccagaggactcttggcggcttcgagacgacggcttcacgtggtccggcgagcaacgccaggaagtccgcggtggcggcgcgaccggctccgcctgtgaggagggcgctcagcaccatcgaagaggatgccgagtgacgaaaattggctttaaagcgcgtttattggacgcgagcaaatgatacaatgctgcaccaaggcataagcctgattgataggtttagtttttcattggatttttttttgtgcaggatgttaaagacttataatgatattgaaaggatatgaaattttgttatttgattgatggacgtttgtgtatttacaataattacaaaattaaatgaaaattttggttgttgacttgcccttgtttagtttccaaaaaattttacaaaatttttcacattccccgtcacatcaaatctttaaacgcatgcatgaagtattaaatatagacgaaaataaaaactaattgcacagtttcgtcgggattgacgagacgaatcttttgagtctagttagtacatgattggataatatttgtcaaatacaaccgaaagtgatactatttctattttgcaaaaaattttggaactaaacaatcctttatcatttcccattgttacgtttgggtg

SEQ ID NO: 5075 - DNA, 4925 bp, Sorghum bicolor
ccaccatgtgcatgtgtgttagcattttcacaaacattttcccaaaggagttagcctctcaaacttgccacgccactcgatcctaacacgtatgcaaagttagatcgctcaagtggcactagatgaccgatatgcaaacaagtttgcccctcttgatagtacggccatctatcctaaatccggtcataaacttctctacacacctatgaccggtgaaatgaaaatgccctaggttatacctttgccttgcgctttccattccatctcctccaatgttgatgcaacacatgcaccaaccaatcaccaaatgatatgatccacttcatatcatcacatgaccgtattggttcatcgatcttgacctcacttgctcttcaccgttgcctcggtccatcggcgccaagtcttgctcaagcttcaccgtcacacgcggtccctcgcttcaaagcctccgacttgcccttcactcttgcaaccggtccatcaagccaagcctcatcttgatcttctccaccttggtcacatgactccatgtcatgtctcatatgcaatgagctcctccatcatcatataatcacctgtggactaatctcctgtgtatctcacataaacactattagtccacctaagttgtatctccctccactttcactcccctagatatagcatagacttaattttggctgcaatctgtgttacgcccagcttcaatatatgcttattgccagactggattgacatcaagccaatacaatgggcaacaagctatgatgatggcaaggccgtgctggagcttgcaatttgcgtcatgggtcatgagaatttgcagccggtcagcatgaatggcaaatcaaaacatcgattcgacttggttgtcggtgaatctttgtggtcaaggaagaagataaggatgctaacatattgccacgtgacaaagtccttatcttaatttttagataccctcaaccaaactagaaactgggaccatctcaacccacaaaatagggatgggccatcccatcctccatagtccccaaaccaagcatatgcttaaaactctcacacagaccaacgtagaaggcaaaagaccaaaatgcccctcaataagtaggtcatgtcttttcgaatggaggatgtacaggttttctagtgcagaagaaattatatacacttaattttttttgtaaaaatttactaagttgccaaataggcccaaccaaactcagattgttctcgtttttgttctaacaaaggtgtacttctgtaactttctgtaagcccttagtttttttttaaaaaaaaggacagcaagagatttgccatgattttaattagacgaagggcttgtttggcacagctcaacttcactagtaaagctgtttttttagaaaatagcttcatgagtgactttctagatgaagctgacttgttttggagaaagtgtttggcaaaatagcttcaccaactacttcatgcatagttgagagagagaaatgagggagaagctgcaataagctacttttttccagcttcatccaacttatgtctttgtgagaggaggagaaaaacagcttcacccatgaagctgttttggaaataagttttggcaaaaaaaacagctcacaacagctcatgaagctgttgtgagctgtaccaaacagacccgaagaagaccttttcgtctacaacattcctagtggtcttgaacagaattgggatcacagaattgttgtgaagtgagagacctagcggccgattcattctcgtcatcaagatagcatgattgtattatgataaccttctgttttttcacctgattagcttatggttattcaatctcacattcaatacttacaagatctactgtgatagactattttctcatgctcatgcttctctgagagaaaacaacaaccaataactagaaacgaaactcccatacatagcacagactgttctataaattagtgttccttacaagtcagtgatgaagctacaaactcagtgtcatttagaggccatccctgcagctgccccccaccccacctattcttggaagcacataaaattgtagcttatatatatatcctgtagagttcatggtttgacagaagaagttgcagttctagtgccaaaaatcatatagttctcatttctcaatagagatggctcaggatatctatctactcttcctgattcttttcattgccttgaacctgcaaagtgttctctcatggaggatgcagaattctacaaatgatattaatagtgatgatcaatgccccccacagccccaccctttagggatgtgcaactcacgggtagcagcttatggctatccatgtgaagaatataatgtaacaacagacgatggctatattcttagcctaaagaggattcctcatggtctttctaatgctactggtaactcgactgagaatacgaggcaaccagtactactattccatgggctgatggtggtaagcacattatatatattgttgaacacaacgcatgtgattcaaatcctgttcacaactgaaaaaatgaatttgctgattgaacaggatggtttctgttgggtactgagcacaccaaaacaatcactaggcttcattttggcagatggtggctttgatgtttggatcgccaactgtcgtggaacaaggtccagtcgcagacataccaccctcaccccagaagacccggttacgttcgcatctctggattgaatttgatcaagaaaccgtatgtcaaaatatttcactgaaacaatactgaacctctttgcaggctttttgggactggacatgggaccaacttgctgattatgatcttcctgctgtacttcagtttatctataaccaaacaggaggccagaaaatccactatattggtcactccctggtaatcattcataggccctcttttttaaaggaaatgcatatggccttattatttagtataccatcgagttgggtcttggaactgggagaaggttctgaaacttttgttttattctaggggaccttgattatgcttgcagccctctcagataacaaggtaacagacgtagtgcgatcagccgcattgctctgcccaattgcttatctcaacaggatgaaatcaaagctcatcttgctggcggctcgtatcttccttgcagaagtaaagcagtgtagaacgaacctccgtattcttattgttgattagaaaggcatggccatatgttcaatgttttatatctatgtttttgtatcatgcagacaattcacatgctaggttaccacgagttcaatcctgttgggtaggcatctcttctacagcttcttgtgtttttttttaaggatggttcttgtgtttgttattaggaagaacataaattacattcagtagaaagtttattaactgctaaaaatgttctgctgcatgacaggctagtggcacaagaattgttaggacaagtctgcgtcaacccagaggtcgattgttatgatttgttttcagctgtagcaggtatcagtgttacctccaccttacttatttattccaaacaatatatatatgatgctgataaataataatgccttggccgtgatcatactaactgtggtttttatgaatttgatctcctgaatgacgaaaggaccggactgctgcctcaatacttcgactacatgcatcttcctacagcacggtccacaatcaacctctatcaaaaacatgattcacatgtcgcagcgtaagaatctctctctttttttttagaaatcagcgtaaagaatctttatcagaaacgaaggaatctgtcgcccaaagcccagtagctttatgtactaaaatttatgtgtgtcatatataagtggtcaggaaatcatcgatcagaaagtacgactacggaaacgagaaggagaacatgaagcactacaatcagacacggcccccagcatacgacctctcgtccatcccgaggcatgtccccttgttcttcacccatggcggccaagatttcctcggcgacgtccctgacaccaggcacctcctgcggacgatcatcagagagcatgacagcgatgacatcgaggtgatgtacatgcctgactacgcgcacggcgactttgtcatgggctacaatgctccacaactcatatacaagcccatggtggaattcttcaagcgtcactaagaacttactccatgtcattttgtcataaagctgctacatactgcaattatttcaggtcatacttgtgtaattcggggaaaaaaaccgtatgtgaaagtttgaggtaaaccccagtctctgacggtatggaagcgggattatcttgcatgtgctcttatagatgcatcttgtaaggctatgctacagtggagttatattgccgtaagcaaatataaagttgatggcttgtaagactcttttgaaattgtgaggaggtgaccactgggtttgaactttgaactcaacctcttttccattttgtttggcgctgggttctgaacactgaaatttggcccaaatcatatacgctgcccagtgcaaagaaagaaatgtttcaattgacaggtttagactttctgatgccttgtttagttccaaaatattttgcaaaatcgacactgtagctctttcgtttgtatttgacaaatattatccaatcataaactaactaggctcaaaagattcgtctcgtcaatttcgaccaaactgtgcaattagtttttatttttgtctatatttaatacttcatgcatgtgtctaaagattcgatgtgacggggaatctgaaaaattttgcaaaattttttgggaactaaacaaggcctgagtctattgctcctctataaaagtctactgaattctccttttgcgttatgctttccttccggatttgtaatgcagtgtagatcgcgtttgacttt

SEQ ID NO: 5076 - DNA, 6289 bp, Sorghum bicolor
ccatggcgtacaaggacgggctccactaccactctacctgtggagtgccgaggcagagaacctcctgttgccaaagagtgcagcatctgctgccattgccagccgcacatgcagatgcagatgcagatgcagatgccacctgatcggccaagtggtttcaggagtcccggcatatagccggccggtgttagctcacactaatctttgtctcactctttcgggtgagtagacaaggttgggaccaaacgattcctttcttgtcacaggctctaatcctctctccaaccgcaatcaagcatgcctagatattttgggaaccagaatttaaagctgaccaaaagctacacaaataatgatcataatcatatagattaagaaaatgataaccaagttagacaatattgtgagctattaatctcctttgatttggctgcttttggctttttcagagaataaagggaggaaaagatgagaggtatggcaacaggtggtgttggagcagttagatgtcacatcatcgagtgacgtgagtacataggattaggacttgttgggaacgcatggaatttttcttgtttctgcgctttttatgtaaaaaataagctgatttctatgaaatccctgcataattctttcatgtcaattttctgtgtttcggacaggctcttagagcctttaacttctttttagcattccacgaagccctggccatcatgtgcattgcaatcagtccaaagtcaggtgaaagatttacaggcccatttctcccaatattacagtcaagccaacccacttctggaaacatcttatagtctcaactctcaagggtacccaaacggacatgtaatacggagctctagacgcaaacctcaagtgtcttgcagctctgtctgtgcatattgcagatcaaccatcgtctgcgtatttttctcttataacaaatcaacgaataatatttttagtcatgacttatcagctaagtgaacaaatatcagattctccattttgccctgcacgaccttatgtcatccaagctcttgaacacagcgtttacaatatctcaaaaaaaaatcagccccagacgataaagacaatttatctatcagcagtcacttcactagtataaaacaaccccgactcctaagtccggatgccatggtttgcaaaaaaggaaaatacttttagctcgagaagaaaattcatctaacttagaggatcttcagaatctcgatttttttggcaagattaaaaaccgctctccaataactctctagctcacctcctaatgtttccgcacttagaaattttgacgcaaccatgcgtaaaatatacgtgcatctagcagtcagccaatccgtaggtggaaggacgtagagaggagtaaggagaaagacatttacaatacaaaagacaaatatatatgcaataaatagtttagatttttgatgcaataaatatgcttccaactttttttagagaacccattgatttatcaagtaactttttaaagaaatattagagagcatctccaagagattagccaaatcattttttaaaggtaaatttagctattgttgaaggaaaaatgtctccaacagactctgtaaatgactcttcaaatttgacagctctccatcccaccttatttactctctacttttggatagtctacctcactagccatccttttacagagtctgttggagtactctaatatctttttgtcaaatctattttagagagtagctaaattagtaaatttggctagtttttgggtaatctcttggagatgctcttattaaatattgcagttaatcataaaaacgcaaaattggtgcataaataaataaattattaaatggaaactacattgcgcaaaaagcggaaaagaaaaggacaaacgaaggaaagaaagcaaggacggggttggaagaaagaagaagcaatcagcgcagaaaatcccccgcgtatataaccgctctccaccgctcaactcccctgcggacgcttcccgtccccccttcacctcggcaccgcacgccatccccaaccagcctacggcggcggtacggccgacttctagcagttgcttccaatccattcattcgtccgcagatttctccattagccgtagagacagttgatttctaggttagtttgttgcctttgtggctttgttagtttattaggtctatcaaaaccaattcgccgacatcacttaagcaagggggaaagcaggggcagtaaaagaagaagaagagacaggtgagaatctgcttgttttctggattcttgatgtgttgctgatccaaattcctaccttttttatggttccccatctaggtttcgattttataccggtcattgcagtgactcttaccgattagattgcgtgattcctgctctagtggattggggaattcttgattttgttcctcctccatgttctgcccttttcttccccatcgattttcgctttcgctctggtcagttcggtgcttatcttcacattccagtatagttctttccagtactagtataatcgccggaagttaggagcctcactctctgtctgtgcttgcttccaatgttagctcaactgaaataagcaaggaaagttcggcttttctctgttgggtggatgcattgaaattgtgaataaaagaatctcggcgatttgataaaaacaccaaaaacatgcttagagcgctgtgaagtcttcacactttcctgcggaataatgtattgggatttgtataatggtgagatttgctctgcaggaatggcaggacaaagctcagactcaaatcccaccgatgtattcgaggagtacatgctgcttgagaaggatcctgatctctaccggatggttttctctggcccgagccagataagcccatggattgacccgagcgtgttaaatctgaagcaccggatagggagaggtccatttggggatgtctggatagcaactcatcatcagaggactgaggattatgatcggtaccacgaggtcgcggtgaagatgctacatccaattaaagaggaccagctgcagttcttctcagcgaggttcgatgagatcttcagcaaatgtcagggtcttggcaatgtttgtttcttgcatggcatctcaacacagaatgggagggtatgttggtcttggactggttgtgacatgttcatctttattgcctccctatgctaggtctctctgtcatatcatattggtgattaatgttaatccatagcgtatttggcttcatgaattttcagatttgtatagctatgaagttctatgaaggatccgttggagacaagatggctcagcttaaaggtggaaagctccctttgtcagaagttttaaggtatggtgaaaatgcctaaagatttttatatatgcatctgttgcaccatggcaaccattaagatcaacatacacgataaaaaagatctgaatttgagcaagtagtttctatgaggcaatgagtatcatattctagagctttttttctccttcttgaaaaatcatactcagactagaaattctgtagtaatatgttgatttattatggctaaaaaaaggaatagcaggacatttgtactcttactgcatagtacaatagtttgagaaaaaactgtacagtacaatggtctggtatccaaaacccatgtgctgtcttaactgccacctatcttatatcaattaagtatgacttcaattcattgtttccctttggtactgcttatggtggtattatttagaggtgtcatgtatgcttattttcttgaatattcttttcatgacaaatttaaatttgcagatacggagctgatttggcacgtggtgtactagacctacacaccagggggatattgatcctaaatctgaaaccttgcaattttctcacagacgaaaatgatcatgctgtgctgggggattttgggattccatccctgctgtttggcctttcattacctaatccggaccttatccagaggcttggaactccaaattacatggctccagaacaatggcaaccaaacatcagaggtccgattagttatgaaactgattcatggggttttgcgtgcagcatccttgagatgttgagtggcattcagccatggcgtggaaaatcagcagatgagatttatcagttggttgtcttgaagaaagaaaagccaatattcccatacagtctgcctccagacattgaaaatgttctttctggatgctttgagtatgacttcagaaaacgtcccttgatgaaagatattttgcaagcatttgagaggtaacatgataagtatcatggtttctcattatctgcagatttttatttgaatttccactagatgagtaattttaccatggtttattataaaaacctgcgtttagtacatctaagactgctaagttctactgtaatattgtcttgtcacctatcaaatcatagaaatgtgtgggcatgctttggttgtttctgtttgtgatattttcccaatatcatatttcccccttctatttctgttgagcaaaatgttagagcacccgttgacctaacttagttttctatttttcattttcttttagtgctaaagatgcagatcatgataacattggatggggcaactctgaaaatgtaatggtagacaggccagccatggcaaaccgcattaattggttgcactttaaggacaagcttgaagtgggtgacaaggtccgttcaagaaagcttaaaaactcttgcagtcctgaaactatggaaatccctgatggaaccatagttggcattgaggatgaaggagagcgtgatccttacattcttgtacgagtccatgggctacatggccctttaaaggttcgctgttcaacagtggagagggtgacatatggttttgctgctggagactgggtacggttgagggaggaggacaagaagcgctctcaggttggcattcttcatagcattggccgtgacggtgcagtgactgttggtctgataggaatggataccctttggaagggtaattattcagatctccaaatggctcaagcctactgtgttggacagtttgtgcgcctaaaggcccatatttcaaacccaaggttcgaatggcagcgaaagaggggtggaggattagtcacaggccgaatttcacacatacatccgaacgggtgtctcgtcgtgaaatttcctggcaaatttaatcttggtgaagtgtgcagttgcttggcagacccctatgaggtggaggtggtgagctttgacaagtgcgaggggattgtgaagaagtacgagcatcttgaggacttccattgggcagtgaggcccctgttcatagctattggtttcttcactgctctcaagctgggtgtttttgttgggaagagcattgcgaggccaaggagtcggaaggttgccagcatctccgatcagagcagtgattaccagcaacaacagcaggtgcaaaacagtgctaatggggcgtggcttcctccaccagttgcaaacatgcttttcggagatgttgttgggacttctggataagaaatcataaaaggtccatgtgaagatggaggtttgctaaaaatagcttcggggaattgtggttcctagttgtgcatatttaggcctgaaatgttttatctaagcatttgtgaatatctctattttcagcaactctgcagcacaagttctgtacataaactccataattatcgtcttataaacatacaactatgcgaagctatttcttgttcggtggactgtttataccatcccaatcttgtgtcctgagatctcgtgttttctgtgcttgtgtttatgtatgatgaattgatgattccagtcgtgtattagttgaaatcctaaaactgctctttgcatttgtttttactcaaaactctcaaaatagttgactgttgcaattgcaacccaaacaataaatgcagctcggcaatgtctgggatcaaaacaaccaacaggatcggcggccctaaatcgttggaattatgttcagtggttgcttcctttgttttttcttttttagaaaggaccacaaaatctcttatagggattgagaaaactgaattccagttttagtttataggggagggcatctacaattggttgagaaaatctatccactttacagtttcctttgcatttaacattacatagcaaacttgttgcagtgtctgtcacagctccatcttcgtgaagaccaaaaattcttcagttgcatcagcatcacaaacattcccactctacgcaaaaatatg

SEQ ID NO: 5077 - DNA, 2995 bp, Sorghum bicolor
tcttataagtcctcacttcctaagtgttagaccagcgcaacaaagtagcagaattcatgcgattgctaaggataattaaacataaatcaaaattaatcagggtaattttcgatcaaatgcatagcagcataaaccaaaggtatcaattcaactaccaatgtcctgaatcacaatggcaagcaagcactagcagggcaccgaagctatgggcctatggcagtaccaaagactggccaactctagaggccgccacggagtaagtagtacgcgcgggctaaccgaactggaaggacgggaagggcggcgcgtcgagctggagccagaggttcttgcccctccggcgcgcggcgacgatggtccggccgaccatggcgcgctcgaaggccgcgcgtccggcggcggccacgaccaccttgtcgtcgtccgccacggcgcagcgcgcgatgcgcctccccacgcagtgcgcctgcagcgcccgccgcgccgcctccacctccggcagctccggcatccccgcggcccgcgcgttaacttccctctctccgttcctctctccctccctctctctctctctctctctcgctcgctcgtcgtgggtcgttagggccttccctgtttccttcttctccccacaccccggcccagtgggcccatgtgttctgagcagtacggcccatgctacatgcacactgaccaagttttttttttttgagcaggacaacaacaacctttgttacacggatattctaggggtgatgtaatacttgtcggatacttggatacggatacttggatatattttagtagattttttttttgagaaagtgtatatctacgtattcaatacgtattacttgtacccgtactcgtgtaatgtagacgacaacaaccaaggttcgcaagtgggcaaatcgcaagagtctccccggcgttgagcggccagcagtagtgaaaccgagaaagcacgcggggctgttggcctgctgcgcgcgcgggcagctcactgctcacacggcggtggcaggaatgcctcgcggtcgcaccatgattgggttggcactcgacagcgccggcccgggcgaaggcgacggcgccggccgacgaacaatggcgcgcgtggacgtaggggggacgtcgggacggctggccggtctactggaccgacagctgcgggctgcacggagtgagaggtcagaggtccgtccgttccggccggttgttggacgggtcgaccgcccatttatgagcccggccggtgaggatcgctgtagcctggtggctggagctcgacggctccatctgtactgaactgtactgtgccggccaccggcctcgacgtcgcgtctaggctactcgtccgcctgaactgaaagcaacgggtactggacgagtagctagctctgtcgctggctcgcgttgtcggatggcaacacagccagccagacagacagacgcgaaacatctattgcctgcattcagtttttacataaaaagaataatctttcgaattttgcaaattccaaaccgatcgaaagaatgcattaatcaatcatgactcgatgagcttcttcagttcttctatgtacaaattgagaaggaatataatctgtaacgccaatcaactgtcattccaacggccaacggtaattaacgatcaatcatgcttgcacacttgcttgcttgctgctgctgctgctgtaagtaaagctgtaaacaaaatggtttgatttcgtctccccaatcctcgcttagctggccgggcaccccatctcgtcgcgggccttgaggaacacgatggcggcgccgtagtgcgcgagcgcgccggcgatgacgagcgcgtggaagatctggtggctatgccccgccaggtcgaacgcgccgggcctccaccgctcgggcacccgggtgaggtagaacgcggtgccgacgaggtaggacacggccatggcgccctcgtaggccagcgtgacgttccgggcgggctcgtgccagttcacggcggccgcgtgcacggcgggcaccacgcccgacaggcccatcccgacgaagagcagcgcgcggtgggcgcggtaccgcgccgcgctgaggcgaggggacatgagcgcgtacaccgtgcccacccccgccgccgtgatcgccgacaggtacaccacctgccagtgcggctcgcactggaagatgtagtagatgggcgggaagaaggacaccacgatcatcaccgcgatgcccgtgtagtcgaggcggatcaggaacaggttcaggctgtgcgagtggcacgacagcaggtggcacgcgctgctgctcagcaggcagaacatggcgccggcgaggaacacgaagaagggccaccgcgtcgtctgcgacgtcaccgccgcgccgtaggagaccagcgtcgggttcgtctggatgaacatggccgcgccctggacggacggaccacacatgacaattccaattccaagttaatatcatcattatttttcatggcaggttagtaggttaccagaatcaacaactagactctgctactactactagcatgattttggcattaaacatctgaaagcaatatgatgcatgctccaaataattgtcaaggtacagcctgaatactacatccaaccatatcccattcaggtttgtactcattgaatacttttgttgccaaacagtgacggcaattactatcaattcagactaaggtctgctatactatacatacatgatccattattaagtaggaccactgtaccacagtaccagcttgttggaatagaagaatcaacagaaaaattaatcatgtgtgtgtgaaatggaaggtcaataacttggcaggaattccttcatgaaacatggcttggcatgaaactacttgtcacatggcatgacatctatgcatgatcatgttgcaatctattgaaagaggaaggttggtatgaaatcctctaggaaatatggctccatacaataacttagtaattagtatacatatggc

SEQ ID NO: 5078 - DNA, 12387 bp, Sorghum bicolor
actaactaggcttaaaagattcgtctcgtcaatttcgaccaaactgtgcaattagtttttatttttgtctatatttaatactctatgcatgtgtctaaagatttgatgtgtcggggaatctgaaattttttgcaaatttttttgaaaactaaacaaggcccaggtcgtgtttatttatgccggcgaaattaaatggtctcgccgaaaatgccttttcctacagagcagggcaatagactttgtagacaaaaattaaatgaaggaacagttatctgggtcttgttccgaaatttttttggttttcggttttgtagcactttcgttttaattgacaaatattgtctaatcatggagtaactaggcttaaaagattcatctcgcgatttacagataaaccgtgcaattactttttattttcgtctatattttagtgctccatgcatgtgccgcaagattcgtgtgacgggaaaatcttgaaaagttttggttttcgggtaaactaaataagaccctggtagtttaggtagtacagtactagactaaggccttatttagttccgaacatattttgaattttggtctagcattttcatttttatttgacaaatattatccaatcatggactaactaggctcaaaaaattcatctcgtgatttacagacaaactgtatagttagtttttatttttgtctatatttaatgttttatgcatatgttgtaagattcgatgtgacggggaatcttgaaaagtttttggtttttgggtaaactaaggccttgtttagatgcaaaaagttttgggattttgacactgtagcatttttgtttttatttgacaaatattgtctaattatggagtaactaggcttaaaagattcatctcgtgatttacaagtaaactgtgcaattagttattttttatctatatttaatacttcatgcatgtgccgtaagattcgatgtgacggggaatcttgtaaagttttgggtttttcggtgtatctaaatagttcaccccgaaattcaaaaagttttcgaaatttcctgtcacatcgaatcttgcagcacacgcatgaagtattaaatatagacgaaaacaaaaactaatcacacagtttaactgtaaatcgcgagacaaatcttttaatcctagttagtctatgattgaaaaatatttaccataaacaaagcaaagtgctacagtaaaaaaatccaaatttttttcacatctaaacaaggcctaatccaactgccacaacaagaatctcttctcctgaacaaggtcaaccggaattcataatatgtcacatgaatgcattattgtgtgtggagtggacgccaagtcgccaacagcttggggggctggtctttcgatccaggaacaaaaagctatcaccagacgaatctcctgccaattctttttggcacgttaattttcctcgtgaatttgagtggatgaactagtttttttcaatgagaaaaccaaatcgcgagccagatgtacatgtttgtcgtctgtttcaatgttagcatcaggggtaacatcacaaactccaacttttatcagctatgccatgagacgtactgcaccacaccattttcttgatttcgacgctatacttgtgaatatcctatttccaagttgctacacaaaaactgcgcaacacagcagcacaatgccaaacaaaaaagcgaagcgctgcgctgcgctctcccactgggatacgttacgatcaggactccaccgtcggatccagatccaacggccgagaccgcacgaatccgcgcacccgctggcaggcaggcgggtaggaagggcaataaccacaacccatttccaattccatgtcgcatttcctttccatttctgttcctctctctctctcttttcccgtcgccgccctcgtcctcgccaccaccaccaccaccaccacttccctcgcccccacccgcacccgccgaacgcccaccccattcggcctcgatttcgccggcggcgatgtacggcaacgacaactggatcaacagctacctcgacgccatcctcgatgccggcaagggcgcagcggcagcgggtgccggcgccgccgccgccgccaggggccggggcggaggcggcggcggggaccggccctcgctgctcctccgcgagcgcggccacttctcccccgcgcgatacttcgtcgaggaggtcatcaccggctacgacgagaccgacctctacaagacctggctccgggtacgtacgcgcgcggctccgctcctccccgtgcgcgtgcgcggagggcgagcgagctcgcgctccccgaatccctggctccctccttcctcgctggtgatccgcgggatgtgttgatcgatctgtgcctgtgtgtgtgtgcggccgcgtgtgcacgtggtggtggtggtggtgggtgcgcgcaggcgaacgcgatgcggagcccgcaggagaagaacacgcggctggagaacatgacctggaggatctggaacctcgccaggaagaagaaggaggtgcgcctttttgctcttggttcgtttctcctcttctctcccttcgtcgtgctgcttcttatgttcctcgcagcttgtgcccatctcggttttgataattcaatccgcaagctgggttgggctccggaaagaggagacgtgcgtgggttagattagcgtttagctggaactaggattgatcttggcataggtgcattttagagagcatcaggatctgctccacaaaatgtttcagtggagtgttcatcgagctatggtccttctcaatgagctttgcaaaggtattgagcagaagttccagttccaaattgatttggaccaggtagcacgcctaggatgtttctgctttgtctgatcgctacttatgatgggataagacattggaccaaaatgccaagcttttcaagctccatatgtgtgattgggtttgtaagttagctattattatcatcacctgtcctccagtttgtcaccttctccctgtggttacttcttcaattcatcaaaaactgcttgctgaagtgttagagtgtgaaagataatttagctcttccactacagatgtatggaaatacagtaatgatcagtatgtgttgatggatcgcactgaccccacaataggatacactacactgcaaagcacaaaacatctattcatattagtctatgtttgttttcagcagcaacaagttgagcatgtaaggaaagaatagtggaaattagccagaggcattaggttatctaccaaggttgatggaccaaagcatgtttcactggtatcagtgtcaccaaaatctccaaaaaatatgctattcctttggaaaatctgtaataactgcatactcatgtcagctaatagagtccaggcacatgttctccattgtattctggaaaagggtttttctaatagtctaacggataactatgatgaattgtgctggacatcatgtttggtaggagtgtcaggttcactcaggttgtttatgtgcattgcaacctcaaaaagcaggaactcttatctatcaagacagtatttctctgttttgcacacaaattctaatattccattttctctgatcaattccaataatttttacttgtgcgtttaattctgccccttcagtccattcaccatttaatgcagactaagcgactgaggtgtgccttatgtggtcgaaaaaaactgaagatttaaatttaaatctgtatagtagactaagaatttctcacatgtcagcgcgcgcgctacccagaaagtatatttgagagttccgcttacactctaaacctataaggctacaatttaaggtttatgaaaacaagctgaagtagaattttgaaccagtaagaattatacaaaacaactttgtgtacaccttgtttcaagatcttcattgcaagttttgattttactgcgatgaagatttagtatagtaaaattggctatgtagcattcgtagcacattatcaatgtaattgaactattttggtacattttaattagtctcagagatccatatcagtattttttaccacaagttaacatctactagactttcttctattttgaacactttgaagatcaacaggtcctaagaacctaaacttccaagatttgcccttctactcttcagtcttcacctaacctgaacctctaaactgcgggtgttttacctggtagaagttggaaacaatgtaatacaaatttgtcctattgagcaacaatcagtgctgtgcagttattcatttgtacacatctaggaggataacatcaatcaatctttactcctttagcaaggtacttcacttcattattacaattaaggtctttcgtgagacctgccccagtgtcaacagaggcaccatgtcactggagctcctcccacggtcccacctgatgcttgctcttgccttattctgtttgccatcatacttacctgttacaaaagagtattcaagatagttgcaggggtaaaacggtgatcccaaacaacggatgttcttttagttgttgtgattgtattagaatgtaacaagtccatattgtggtctttgtctaaagtgtccagctgtagatggtacatggccatcctcctcaccaaaaaaaaaaagaaaagaaaaggaaaaaagaaaagaaaagaaaagaaaagaagagaaagcctttggccaatggggaaagattgcccagtattgcactaagagctctcagacaaaccgacagagaaattccccgaaccatggcttcacctatagggttgcactctaacctcggccaaccatgaccctctgggatggcgaccattgcaagtatcccctggtaggagggccccaatcaaccactagtgtcacaggttggtgccctatgaatatttattgggttgccagcgaggggacttttttggtgccatgaggatttgagccctagccagggtctccctcaactacagaggttaccactacactacatgagttttggccttttatgaatcttcaattcctcttggtaacctgcagtatggatatcaagggcctagatgagtctgggctcatgggctgcttgtgatataaagatacaagataaatgttagtttttcaatgcttctaaccactggcttgatgacaactttcttaagcactatgcaaagcaagtggaatcaggggcagggagacctcagttgggtttggcaacatggatgatcgtccaatgtgcatggccttttatgttcagagacctttgtctgtttaggcatatatgtgtgaagatatgattaaaaatattatagaatgtgtagaatatcacgtggaagtgaaaatgtgggatttgagtggaagtgaatagatcaagagatgtaggattcttttttggcggaagatgagggatctaattttttattatttaaagaggtggcatactggcatgtagatcctctaagaccacaaaatcagattgttacaagcaaactattttttctacaagtacactgtcattggctatttgtttgacttattaaagtttgtttttttccctaacatactgctttacactcttcacttcaatagaagttattttctttgtgtaaaggttgtatgcacataaaccatgctatgaaaagttacttatgagtggccctatgacatttgctgtttgatgtgttgttactttttttttattgaaatttgatgtgttgttacttgttaatgcgtggtgttcatagcttactggtccttctctaagtagtcataaaaaaggaatcgattgttcagttcaacaaaactcattgaattagtttaacatgcatgctaaataaaattggcatcatgggtttacagtccctatttttacttgtacttcaaatgttccaacagctctcactagtgcacacttcacaactcacaagatatattgacattatagtgtatttctttgtgcatttaatgttttgatttctaatctgataatgttgttaccagaagtgattttgttgttcagtttttttttttcacatttctgctttatcttgttatgtgataattacatgttaggttgcatttgaacttctatctcttccatttaatatagtttttctttgttatgtaaattccaatattcagtttgagaaagaagaagccaatcgcttgtccaaacgccgtctagagactgagaagccacggaatgatgctactgcagaaatgtctgaagatctttttgaaggagtgaagggagaagacgctggtgatccatctgttgcctacggtgacagcacaactgggaacacacctaggatcagttcatttgacaagctatacatagtcttaatcaggtacataatagtttatttatcttctataatatttttttgacacttttatgtacatgctacagattgattaagctgcatgtaactaattcatcatgtgacagtatgctattcatatctgttgcaaaatgatttacattaaattgaaagaagttcataaggaaattcacttccacagatttagcctgaacactgcatactgttcatactattcttagaatcggtggtttcacaagttggcatataatccaatttaaatatgatgtaatcctttggcttgctggtatttgtgttgaaatatatttgccattgaatttgtgttatgatgtattatactgtagtcttcatggcctgatacgtggagagaatatggagcttggccgtgattcagatactggtggccaggtaatggtatcgtcggtgcatttatttatagaatcaagtataactgcaattctttcttcagaatgaataactcaaactttatcctgtagttaacggagcagctatatattccatttgatgtttcgaagatattcactaaaaagatactagtatcatacaaggacatgatttcactttcatccactgtgtgctgtttcataggtcaaatatgtcgtggaacttgctaaagcattaagttcttgtcctggagtttaccgggttgatctattgacaagacaaatcttagccccaaattttgatcgtggctatggtgaaccagatgagatgctggcttcgacaagtttcaagaactttaaatgcgaacgaggagaaaacagtggtgcacatatcatcagaataccatttggccccaaagacaagcatctagctaaagaaaatatctggcctttcattcaagaatttgttgatggtgcgctagctcatattgtgcgcatgtcaaaaactataggcaaagaaactggcagtgtgtgtccagtgtggcctgctgtgattcatggccattattccagtgcaggagttgctgctgctctactatctggagcacttaatgttcccatggtgtttaccggtcattttcttgggaaagataagctcgaagggcttctcaagcaagggagacagacaagagaacaaataaacgtgacatacaaaataatgcgccgaattgaggcagaggagttgtcacttgatgcatctgaaatagttatcgcaagcacaaggcaagaaatagaagaacaatggaacttgtacgatggttttgaagtcatgcttgcgaggaagctccgtgcgttagtcaagcgtggcgctcactgttatggtcgttatatgcctcgtatggttgtaagtaaactattcctctgattccgtaaacaattactcactagttgcatttttgtcatattttataggtgggcaattagcattatgctttcttgctgtcgtaatatagaggttttaaatgctctagttctctattacttgctctgcagataattcctccaggagttgaatttggccaattgattcatgattttgatatctatggagatgaagataacccatctccagcctctgaggatccatctatttggtttgaggttgtgaaattattttaagatgcctacattcaagattttactttttattttacttgatacatcaatttgtttattcctgttgatcctgtgtgtgtttttaaagttcatgtgctgatggtatgtatgtgatgacagataatgcggttcttcacaaatcctaggaaacctatgattctggctattgcccgtccatatgctgaaaagaatattgcaacgcttgtgaaggcatttggtgaatgccatccgttgagggaacttgctaaccttgtaagataacactggaacctgacatttgagtgttttgggtatattgcgttccgatatcataattgtattgaatatgttagtaatatggaattttgatacgttttccttggtaccttttgattttgcatttccagacattgataatgggcaaccgtgaggctatttccaaaatgaacaaagtcagtgcagctgttttgacatcggtgcttacattgattgatgaatacgatttatatggtcaagtggcatacccaaagcatcacaagcactctgaagttcctgatatttatcgtttagcagcaagaacaaaggtataatgtttttaaccaaaaaaaagttccatatttccccccttcttttgaatgccaagaattgaagcacttatctttaatatctatctgctttgtttttcttccaacaagcattcatggtatatccaactgaaatacagtagccattatcttattttaagtattcgctgatacaacttttcttgtcatatgtatgccagggtgcttttgtaaatgttgcctactttgaacaatttggtgtcaccttgatagaggtcagaacttttgaaatcagaaattcatttatgtatctcaccatttccatgcccttattacctatctgttctttttgtgagcaggctgccatgcacgggttgcctgttattgcaacaaaacatggggctcctgttgaaattcatcaggttcatgaatcacattgtaccatttattgaattaatagcgtattgacttacagctgtaatagattggatcctttctggtggatgttgatgtaggttctggaaaatggtctccttgttgatccccatgatcagcatgcaattgcagatgccctctataagatgctttctgaaaagcagttttggtcaagatgtcgagataatggattgaaaaatatacaccaattttcttggcctgaacattgcaagaattacttgtcaaggatattaactctgggtccaagacatcctgctttcgcatgcaaagaagaccagaaggtgcctgtgaagtgcaggaagcatatatttgttattgctgtagactctgttaacaaggaagatttaattcaaattatcagaaattctgttgaggccacacgcactggaactatgtcaggttctacaggttttgtgttgtcgacttcactgacaatagcagagctacagtctgtaatagtacgcacaggcatgctccctactgactttgatgcctttatatgcaatagtgggagtgatatatattatccatcacaatctagtgatgtgccaagcaattcccgtgttacatttgcattggaccataactaccgatcacatatcgagtatcgttggggaggagaaggtttaaggaagtacttagttaagtgggcttcttcagtagtagaaagaagggggagaacagaaaagcaaatcatctttgaagattcagaacactcttcaacatattgtcttgcatttagagtggttaatccaaatcatgtaagcttctttccagatcctctaacatttggttgaaattttgcccactcattatttggaccactttattacagtttaagtgtgcaactttttatttgactttgtttatatattgtagttgcctcctttgaaggagctgcaaaagttgatgagaatccagtcactgcgttgtcatgctctgtataaccatggcgccaccaggctatctgtaattccaattcatgcatcgcgatctcaggctctaaggtctggtgcttgattttcttcatttgtctattaattaactcttcctttttaaaggaaaatcatttatcttttatgttgcaaattagttgcagtatcatggcgtgtggagcatttaaaaaaactgttttcaagatgtggaattttcttttccttaaatttatgagaaaagtagctcaataccattataaaaaaggtatcaattgaatattacatgtactgtgagtctgacaaccatgtttcaagtacacattggattctatttatcaacttggtgtccatgctgatggcactgagcaatatttcccttcgtgttggccgttggatgatttattccaatcatgaactgtttcaacagaagactagactagtaggagtgagaaacttggtatttacactggttaggacccattttttgtttgcctcttctcttctctgtttcttttcctcccttttgtacagttggcatgtgtgtggtgttcaatgttattctttggtttgctctttattacttcttatagtgaccagcagttctccttccggttccaaaaaaaagcagtgggagtgagaagctggaccctattgctttgtttagtaccagctgattacctgtcaccaggattaaaaacttaaaattagtgaagctgtatgtggctctctccttactggtctcctaaactgctctgtaattggttgggaattgggtggttaccagaatataacagggaaactataagtttataacttggtcaaaacgggtcaggatcaggtgtaaatgctaaataggtgttaatgcaggctgcgaaccagttttgagttcatatgggggatctgtatccttgcctaaaccagtttaactataagccacatgatcaggttggttatgaacctggatgtgtaagaaatcctataataatattttgatatacagaactctggcgcttctggctatagtgagagtttaagtagctaatgcatggggtgttttattccctataaaatatgagttctttttttgtattttttacctttcaaatgttttgtgcagccctaaaaccctaacagtgtaagaagttctgcaatagataatactgccaccatcactaaaaattttcactggtctggtctgggatctgtacttttgattattgtctttgggaaacattttatgtatttatttccatatccaccttgcagcaaacatgtgtacaaacccactaacaaaattttctattataggtatttgtctattcgctggggcatagagttgccagatgctgtggtcattgttggtgaaactggtgattctgattacgaggaactgtttggaggtcttcacaagacagtcatccttaagggtggattcaacactcctgcgaataggatccatacagtcagaaggtaccctttacaggatgttgttgctcttgatagctcaaatatcattggaattgagggattcagcactggtgacatcaggtctgctatgcaacagcttggtatacccacacaatgacaccaagtgcaatctgttttgttattaatataaagaaagaaacaaatgaacaacacgaatatacgatacaaacactttgtttccattctattggaaacgtccgattttgcctgccagtcatttaatctatgtgtgtggtccctgcatgggttatgaatgacattcccttggatccccgcactggaaatttttggagcgaagagcatgttaatggatacatccagctgtacagacgaaacaaatttgtttaaatgttgatagtggaaacattttgtggaagcattttcagcaaacaagcttccaatatacaaagctcacactttttccatcacttcaaagtggagcttatgattacagcacaaccctctaaactcttttttttttcattctaggaggggtgccttatattgtgtaaatacagtgtcacataaatttagcaccatacatcttgttttcttgaattaatatgccccaagtgtttactctcttttatatgtttttttccaacctgtcttgtggttacatcattaatacctttatccatctgctgctctagtagttatgaaattattgtagcaactgtggtgctcccaactatgacttcatcatgcatgtattgatgccttacattatcctgcttaaacatcattagttgctatgacttgcactcaaagcagcttctaagtttggtgtagtagctgcaacaattacaccacgcccatctgctctcctcctatcatttgcccccggatgatcacgtttttacttttgccatttgtttgacctgatttggtcttcttttgcttgttcttgtgaacccattgaaccgtttacttcctttttcttttcccctctgtgttaaagagtttgatcttgaagctaaccaatacctgttgccaaaataaataaaaaataaatggggaccagttggaccgattggttatcggtttatggttggc

SEQ ID NO: 5079 - DNA, 3004 bp, Sorghum bicolor
tacgggaccatctcggacgactcctccacatctacctggtgtacgtacgtacacgtacagcctctgcattattatgctttctacgaccccctttccgagtacgttgtagtgttaggaacaggagtaagtatctaggttaatgcggtggtgatcatggtgcaaactttatgaaggataccgatcatgtgtgtgtccagggagtagtatagtagatgtgtcatgtcgactttcatagtccgatgtgatgcaggataagaatatgataagctagtggtggtgtgcaatatactacacgcgcgtcagtcaccatgttatttccccctctcttttccaaagtggtttactgtcatacagtattataaactagtagtaccaataaactaagagagattaccacgtgctaaaaacacaagcaagaagacatcgaggtaggcagaggcaatgtgccgcctttcgactgcatgcagccccctcgcctaaacaggcggcgcgccgtaactccgaagcgtgcccgccggtaccgtgtcgatctgaaaaacgaaaggttcatgtcatcatgtgtgctcccggccggcccacgcacgtacgaagttcattcccagtgcgcgaacagacgacgcgtccatgtgaatctggccatgcatgcatgcatgtgagtcagcgtcagcgatctgcctgcctgcctttctcggggcacgccgcggttcaagcaaaaggggacgatcagctgccgctgccgctgccggccggcgcggccgccatacatcgcgccggccggcccccggtttccaggaaatttccgtcccagagctagcgtctacatgcatgcatgctaactactccgaccatcttgctgtccatatgcatgcccgacgactgtacgtctacgcctaccatgcaagttattactaccatgctcgccacatcatcaagtcttcttttcctagctatctacacacgtgccggccgatgatgacaaacacgtaccctagaggaagagattaattagagatgagatgatgacggcgatgatgatgttgatgatgatgcatgaggtacggtactcgccagcacattaattacagagagcccatcacatgcacgtcaacacagcctccatatccggcgcgtctccccctcgccggggtactgccgtctagggcgctgccaagtgccaagtgccaagccagcgcacatatggagcaagcaagcagccatgtgctgccatgacacatggagagcgagccagcagcgatcgatgcaaatttaacctttcgaacgcgacgctacctctctccatcggttttcggcacatgcacgtacatagctcgcactgacagcaggtttgtggacatcttgtttttgcagtacagtcaacattgcatccatccatgtatggctagctaaccagtaccccaagagctagccaagaccaattgtgcatgcatgcatgttacctacctatcactatgctttggatttggttggcagctggttatagtttactcccatctcttaattacaacgtggagcattgcacttgtggtttaatttcttccggccacatgctgacatgcatgcatctaataattaatccgattctccgacagtagcccattaaacaagaggcgacgagcacgttcttccgttcgattattacagaggtataaacataaccacgcgtccatgggagataacacgcatgttccgtctcagccacatgccatgtcgtcggagccacacacaacatgccggccggggccggccggccaagccatgtacacgcgtatataaacagccatgagagcccccctttgatatcagcattcaagcaacattattactcgaatcatagtaccattcatcttcctcagctcaggcaaaacgacaagagaaacaacatgcgaggccctaacgccgccgctagcacggcaagcaaaggcggcgccatggccgccttcaagcaaggcctgctcaggaacctgctcctgggcctccgggcgtgctccttcgacgccgccatgagcctccaggagcggaagcgcgccgtcaagtgctccgccgacgtcgccatggcagcggccgcagccgccggcagcgggcgcgcgaggtggcccaagaccatcttggccgccgccgccgcggcgtccagctccagccaccacagccccggcggcggcacgtgcaaggtgtggaagaccgcgtgctgcaggaggcgggtaatgaggaggcgcgtcgacgcgaagaggaggatcctcaggggcgccgcctacgcagctgcttctggtgccgctgccgcggcgagctgcgacgacgacgtcgcgaggaggctggtgcggaggaggacaatggcgctccggaaggtgatacccggagggaacgccgccgccatgatggacgacgccgcgctgctccgcgaaaccatggactacgtcgtccatctgcgcgcccaggtcgatgtgctccgccgcgtctcggcagccgtgcagagatccgccttcctccggtatatgcttctttttgtattgcattttgtagataggttgaataaaagactactctattttatttcgcaacttcgttttgctacacgtacacagtgtgtgcctaaactttttgtcgctttatttacctagggatccttctcaagacatgggagaatcataatgattcctggttcagaagatcgagaaggaaatgcatcatgaaacaaggtcatgggcggcgatctgacggcgattagagaggacggatctccgagctcgtggtagacgtaatggtgaagaactgatcagggttttgtctcgcttcattagtgggacatgtgtaagctagctagacacagctactgttgtacggcgactcggggaggaaagggacaacatgctattgtagatgaatatagaaatgggtgccaatttagtctcacttatggccactcattgccaacacagaaagaggggaaaaggagtggaaaataccaaaaagatcattgatctgctag

SEQ ID NO: 5080 - DNA, 8801 bp, Sorghum bicolor
gaatcagtggatatatttttacaacaaatttatttagaggtaccttatcattttttataaatttcgttaaactaaacaagtttctatatctgttttggaagggagggatccaggcagcgaatccaacccgggacgtccaaaatcggatggccgagaagggaaaaaaaaggaaaaaagaagaagcatggtactaaccaggcactcaggcagctgacttggcgagctggagctggttgccccgcatccccccgcagcagaggccacagccatcatttaaaaactgcccgtccgcccggttcccccgccgcgttttttaacccctctcccctcgtcgtttccctccgcgcccaccgctaccaccagtccaccaccaccaccagcagcaccggggggcggcggccagatcggccggcgagaaaacggaaaaaaaagagaaagaaaccagccacgagggcggaggactaaacaagtcgcgcggagggcgacgccagttgcgcaattcttttcgctgcgcacatggcccctccccgcctccgcccccgcgggcgcgattccttgcaccaccagctgcccctcccctccgcccccccgcgcaaattttatactattctcgtcacatggccgctgcgcccccccgccccccgctcgcggccattagatcctcctctgcaaactccaccctcttcctccgaccctcgcctctgctcctgctccccgtcgcattgaccttcctgctcctctgctcgcctacagctccgctccacgccgctccgtccgtcgaggccgtgacgactcgccgcgggacggcgtctctccgagctgcgccttgttcttccaggtgggctatccttgcttgcgtgtcgcgaggttttagtagtgatcgggagtgccagcaggccggccaggcattttgtcggatgggtggcgggcgtagtgctatccagtccagctgttccgttttggctgtttttctttctttctttctttctttctttctttctttcgtgcgtaccatccttgttcgggcgtctcgcggtgaaagatttgatctcgagcgctccaggatcacttgaagttttttttttcggcatttcatcgaatgggcagtgcgcctctagcgcgacagagcagggatcctactgggatcaggagtctctgactttgcggttgcgcgtcccgttgctttcctggtttccgttaagcttgagtgtttgactttatgagctgtatgtatgccgcgtagttgatccgtaacgactctggtgtgatctcctggagggttcagtttagttggttaaggtagtttttctcaggtttgcatctctgtgttcagttttgttcagttttcagtcgcgtttgattttgtccacagctggagcaccccagaatcttagattcggttgtgcacttctttttactgattctttccttgatccaaagatgatctccagtatgcctcgaggtaatggaaggttccatctttatggcttggaattctgttaaaagctgaacttcgtgtcagcttttggtacggcactgtgtgttttcttgagcaacagtcagcctttcagttgagatgttccatatatgtcaactttctattagtcatagtctgctccccagtcagcctttcagttcctgtaatcatttgatttgcattggaaaatttctcaatctctttatctattatcatgtatatatcctttcatttgactccttcatgaggataccatccttttgtttaatttggtactgagccgcaaatgggatgtatatgcagataaggagcagcttctgattctcgctctctcattggttattcagtggaactgttatgctaccggttatatcattttcagagaacaaggagcatagaagtttcagtcatggattaatgttatcagctatagtcagcaacatcatctgttgggttcaacagtcaactgatgtgtgagtaaaatttcaacgtgaacagaaaaccgtgctgattatcgagaaagatgggggacaactacgtagctgaacctgaggacgaggttccacaatcaatgtggcctgagaatataggagacaaacatcagaggcagttcagaatggaaaactttaggaaggaccaagatgctttcaaggatgtgaagtttgatgaaaagcctgttcatgtggattaccagcggcttattgaaatggcaaattctgagaaaggtatttctcagatgcaatactttatgaagcactgggaatataagagagccaatgctgctcggcttctggaggaagagctcggtcttctctgccaacaaaggaaagagattgagcaaaataagcaacaaatcttggaagaacaacgttttcaggatgagagttattatgctgtaaagcggcatgtaccgatactggatgaagtttatgaagatgaatggaagcgacctagcaaaaagaatgacgatctttctcgtagtagagagactaaaatagatgcagattatgacagtgtttcctactggaaagagcgggcaactaagttagaggaaaaacttgaggaaagcatccaaagggagcgttctttagttgagaaattggaggaaaatataaagaacctgcagtcacacacaccagctgaggaattctctggaatgctaaaacgcgctgattacttcttgcatttggttctacaaagtgctcctattgttattgctcatcaggtacgttctgagatgctttttcaaatagggcatgacatagaacattggacacgaacttttataacagggtatagataacccatatattgttcttttcaggatgctgatttacggtaccgtttcatatttaaccactatccaacacttgctgatgaggtaatcttgacacctttacattgtgtgttgctgtatgattagagtatgcaatggctctgaacattggcaataaacaagcactacatgagaatttgatgttctagtactttcaataagttgcaactttgcctgaagcatatcatttttatcaggatgttattggtaagacagactatgagatattgtcaggtgagggtatagaagagatgaatagtgtcaagcgagaagttatggccacgggaatagcaactaaaagagaatttgcgtttaatacaccaatgtttggggcaaagacatttgtgacatacattgagccagttttcagcaaaggtggggaaacgattggcgtgaattatgttgcaatggacataacagatcaggtacctttatgaatttgaattctcttatgatttacctttgattccctttgcttctggatgttgaaaattctgatattatcattgcgggggttctattctatatcggtacaagctgtatgattctttgtttctctttgttttagtgtgcactagtacacttatcttccttggtaaatatggtactgcaatgcttgtgagtctcccaatggatggataatattgtacctagaactgcatgctaaaatttcactaccaccaaaaaggggacatgctatttcctaaatgttcatgatgtagtatatttttattggctggtaactagcacaagcgaccaatagtaagcttttagttgctatactgcatggatatattaacagttttgatttttaacattgatgccttgagatgattgtacaaactattttctgagggtatttttctcatgttatctcctggatggaaaactgtttgaacacactgaatggtgttctgcatttcatttcatgcttttgaactgcaattaatctgcttctttgcacattaggtcaaaagaagagagaaaatggcagacataagggtgagggaagctgtccaaaatgccaaggaaaccgaacttagcaaatctcttcacataacaggtctgcatcttgttacaatactcttttgatgcacttatgctagattggtattcaggacacttactttaccttatttcacatttcagaggaaacaatgcgagcaaaacaaatgctagctaccatgtcccatgagatcagatctcctctttcaggtgttcttagcatggctgaaattcttgcaactaccaaactggataaagaacaacatcagttgcttgaagttatgttatcctctggagatcttgtattgcagctgatcaatgacatccttgatctttccaaagtggagtcaggtatgttatgcattgcaaataagtaaataatgatttcataggataggactaagatgttcaatacttgtttcaaactagtttggtgctgctaattatttgattagttatgttatttcatgccctaagttgaattgtttgtttatgccttcatctttcaggggccatgaaactagaatctacgacatttagaccaagggaagtagttaaacatgtactccaaactgccgcggcttctctaaagaaggaattgacccttgaagggtgcataggtgatgatgttccagtggaggtaaagagaattacctatccttggcatgcttcttgtctatactcttgaggttttctaatttcacgtatctacagattgcctttagttggaaaatgatgtacctgtttacaaattcaagtatttttttaggagataccgttgggaatataggtatccagatgcaaaatgacacattcactcatcatttgttttctaatgtattggtgtaggttattggtgatgtgctaaggattcggcaaattctgaccaacttgatcaggtatggacttcatacattatgaaggcatacagttgggtactcaacttaaaagggttgatgaaactcatttacctgtatacaatggaaatatgtgtactgtagtctgacattattcggtattttaaatcaatgcagcaatgcagtcaagtttacacatgaagggaaagttggaataattcttcaggtcgtgcatgacaagcaaccaggatgcaaaatagagggcgggaaaattcataagcgagcatattctgggacagcaattactgctgtagaaactgctgttgtctctccaagaaattgtgataaagataatttgcattgctcgaaacatgaagatgcttttcagaatggtgttccaacatgtgaaaatttcaaggaggatattgagggagaggaagtcgtttggcttcgctgtgatgtatatgacactggaataggaataccaggttttcactgacaatttttttattatctttggcataatcatcttctccatatatcacttgatggataaactttatataatgcttgctacatgtttggctttgtttctgattatttcaacatctggccacctgcagagaagtccttaccattgctgttcaagaggtatatgcaagctagcaccgatcatgcgaggaagtatggtgggacagggcttggccttgcaatctgcaagcagttggtatgaacttcagttcccatgcattgatgcagttaaaggacgcaatattgtataatgctggtcgttttatttttttatgtgaataattatgcatacatggaactcagataaatgatgtacataagcatacatggaacacagataactagaaatacaacagtaacacctgtaactttagttgtaggttgtaacttaaatcagccccatggtaactgataaaagtgtgtgtgtttttataatgatttaggtggagttgatgggtggtacactgactgtggtcagcaaagagaatgaaggatcaacatttacatttgtgctgccttgtaaaatccctgtaaaagaggagcatagtgatgatcctgatgaagtgcacagttctcagaatgattctgcaaacagcgatatagaaggttctttcttttttaagccacaaatgcgagcttctcttctgtctcctggagtttcaataatgaacaacacaaagttatttggtgccaagcttatgtgctatgatccgccggacaaattgttctcaaatggtttctcatcaacggaacctaattttacaaatacctctactgctcaccaacctaatggtgatactgttaggagcacagctgaagaagaacatgataatgcaatggtccttgaactgaatagtcaagctgaacgggtttccagttcccgaggagacttggtatctgtttcaggtgctgctccatgcaaagttcttgaagaacagtcattccacaagaaatcaaagtgttctccaaccagcaacaaagcaaagatcctcctagttgaagataacaaggtcaacataatagtggcaaaatcaatgctggagcagctgggccatgcaatagatatcgtaaataatgggatgcaagcaatccgtgcagtacagcagcaccaatatgatcttattctgatggtacggctagaactgttttcaatgatgaaagtataagtgttacatgcttattagttattattacttctgtttatttatgtttacttcatcaactcatccttttgtattgtcacttagttcccaattgtctcacctcaacatcttataagatgcagaagtaataccctgaggatgcaaatcccgcatcaaatttgtgaccaaatggctgatttcatgcagagtgtgccaaagaaaacaaagaaaaactttgtaatcctattccaaattataaggcgttttggattttctagatatatagcttttgctatgcacttagatatacactatatctagatacatataaaaacaatgtatccaaaaaagcgaaaacatcttataatttggaacggagggaataattttttaaattattaatgatacacattgatgagtttaactataggcaagggttatattaatgattgattggcttggcacaccctgtataattgtttaagacacctgttcagatttcttctaaggttcatggattatccttgctgttcccaatggttgctttcccatcataccagtgaaccagtagtccagtacaagtgttggcttgtagtccttgattaccttgacaaaaacaatgttaaatcattacagcacctcgtggtgtgatatcaatattggtattccaggatagattcacaaaccaagtcaaaatgtttataatatattacaaacattttgcttccactcctctaattaaaatgctattggtttctactttacaggatgttcacatgccagaaatggatggcctacaagccactaaacatatccgttcttttgagaataccggctgttgggacgtttctgtaaagcctgaagacaatcagatgataactgactcaactatttcatcagattctgcacatgcaaaaaagcaagggcagagggttcctataattgcggtatgtttacagttacactaaattcttaactcatatcaactaagatctctttgtcagctttacttgcatgctacttcatatatttttcagtcgagtaaaatgcattggtggtccttaaacttgttccgtggtgtcatttaggtacctatactcttaaaatgctcatctaggtccctcaactctaattgtgtcacttgaggtctagatcacccttatcaggaagtaattacatatttgacattctggtcgttgtcatcttgtactccagtatactccatatagggtgtcatggttgcatgccatgcagaaaagtttttgttaattagtgtgatggcgaatggacctctagctgagttgattaggtggctctagtaacactcctcaggtccacaccgtgggagcgaatttcaggctggggttaaaaaaaatcccctgtctgtcccacactaaaaaatctctgatgtatttcgctccttggtattttcttgatcaaatgtaaatagaatcctcatgtcagatgaaattgtattcttccaaccctaggttattttttgacattttataaccatgtaaaatctccttatgcattgcagatgacagcaaattcattcgcagagagttccgaggaatgccttgctgcaggcatggattcctacatatctaagcctgtgaactttcagaatataaaagaatgcctgcagcggtatttaatgtctcaatgactaaccaactgttgtaaagtagaaaggtaatctgtagattaggaaagttttgtgaaatcacctatcagtccgtttcttgtaaatcaatccgtaataaatatagcgaatcctgtcttgtcgaccattctacctttactactgggagacagagacagagctctattttggagagcatcctgaatctgacctaaccccaccagtaagatcaagagctgactctaaactttaggatcctcatttgtttacgagacatattcctgtatataattgttatggaggttcttatcctttagcagtcagtattctatctgtatcataattgatgagcaacatgggttttatgatgatgtgatggagaagcaaaggtgtgatacaattataattgtatatctattgctgcaacatttatggatcaaacctgccatcttttcgatacaaattattctaataatctatgctcaaaaatatagaagtttgatattttctattgtatagaaacactagtggttattatcctcctcatctcttagtatcttcttctaacttctaagtgtatactgttgttgtactatatggtatcttcttctaactgttaggcaaatccagtgataaattgttcatgctctgctagctaagctgtgaacaatagttttaaagccagctacaatgtttctgggcacagaatttcaccaccattagaaattctttacattttcattctaaaaagttatactgccacattctccgcataatgctatatatgcacacaaaaaagatacagttg

SEQ ID NO: 5081 - DNA, 3830 bp, Sorghum bicolor
acatcaccatggccattgtgaaggcgttttaattctctgatgatgatgaattcctttgcaggatctggacatcgccattgtgaaggcgacgaaccacgtggagtgcccgcccaaggagcgccacttcaggagtgagtgctagctagctcgatcgattcctatatgttttccaagagggcatgcgcagcagcaccagcaggtgttcatggttgcatggccggttttcctctgcttcgtgcagggatactctacgcgacctcggggcatcgcccgcgagccgacgtcgcctactcgatatgcgcgctggcgaggaggttgtccaagaccaagaactggatagtgggtcttgcttcttcttgctccattgtttgttcatgaattcaggatgatgatcctttgattcactcagtcactttacattatttccttttggctccctttgatcccgctacctttctgagaactgctcgtttgttacatttgtgatgtgaagggcagccaacccatttcttgattacaggtcgcactgaaaacgttgatagtgatacacagactgctcagagaaggtgatggcacattcaaggaggatttcctcacctattcattcagagggaacattctgcagatcccactgttcaaggatgactccagcccactaggtcgttttgtgttcaatctgcattttttccatgggtgcaaaaatgtgccttccctgtgtttgttctacttcagcttcaacgactgaacaaacaggttctctgctcgctcgcttttgcatgcagcttgggactgctccgcttgggttcgcacgtacgcgctctacctggacgaacgggtcgagtgcttcagggttctcaagtacgacgtcgaattagatcgtctgctcaagttaccccaggcttctggcaaggtaggcatcattgtgaattgtttgctccatgtgaatgctattctgttctgaatcttggcaaattccaggcacacagcaggacaagaaccctgccgctcggggaacttttggatcagttgccagcattgcagaaactgcttctcaggcttatttcctgccaggtttattgttttagaaaatggaattgtgttaatcccagctcatggaataagaaaacactgctgagcttgaaaaataagaaattgtgttaagacttaagaggccactgtatacatacaactctctgatatagactgaaaccgatgcacaccatttcattttccattgtcattttgcagcctgaaggtgcggcctgcacaaattaccttgtacaatatgcgttagctcttgtaagtctgaaacttgttctagcaaagattccttatatccttaagtcttacagaggtcttatgggccataggttttgaaggaaagtttcaaaatatactgttcaatcaatgatggcatcatcaatcttgttgatatggtaagttccagttcgtactgagatgcttttttacatatatgtccataatctgaacactgggaaaattctttatatttctctcatgtgacgcagtattttgagatgccaaaatatgatgcaatcaaggcccttgaaatttataaacgagctggtcagcaggtatagaaactaagcaattataccataaactgggttgtagagtatatatttggaatgaactatctggttcttggaatctcattttgtgtaccatcaatttgacaggcagaaaaactttctaatttctatgaccactgcaaacatcttgagctggccaggactttccagtttcccactctgaggcaggcatgttccgacattcattactgattttaacagataaatcttcaggaatacatcactgactataccacagttacaaatgtaaaaatgccagtcgtttcaatgccatttggaatgacttaaattttgtcctctgcacactgtattgtactattagtcactcgctgtattgatcggctactaattaccactatacagccgccgccttcatttcttgtgacaatggaagagtatatcagagaagcaccccgtgccgatactgagagtaagagttcggtgagtgtgtccagtgtcagtggagctgcaaaaggtcaaagcacataggagaatatctatgataattattgctgtttgctaaaccaggaaaaccatgaagagaatcaacctagtgataatgaagaagcagctccacaggaagccgagaaaccagtggaagatgaaaaacaagaatctgcagagcctgaaacagagccacaacctgctgctgggcctccggaagaaccagtggaacctcagccacgggcgactactggggatctattagtatttcctctatgtttcaaggagaatctacactacagctcaatacctgcttcttcaaagcctcatgttttactaatatatgaattgcagaacttggatgaagaagtaaaccccatgattgcagaccttgaagaaagcaatgcactggctcttgctattgtggcaccaggttcagtgtttataaatatcaatgcactgctcaatagcaaatcctgtgaagcatattgcaccagcaacaattttgaattggtgctattttgtgcagagaatgattttacttgaggaagatcatacgtgttctcatgcactatgtagtaactttgtctcttaaatgtaggtaatgaaaacaagatgtcaaattctcgagacttgtttgcccttgacaaggctggatgggaattggctctggttactgcaccaagtaaccacacaaatcaacaagtggacaatcaattggtatgtagatctttagtatctctagagaaaatatgatcatatgaattcacataattattagctgtaaatgatgctgtcataagttataatagaatttaagtaaaagcaatcagagctaaattacttacttgcatttgttcaacaggctgggggatttgacaagctattgctagacagtctttacgaagacgaggcaaggagacagcaaatagccagtgtgacctacactggaagtcttgcagcaaacccgtttgccaccagtgatccatttgccacgtcaaacagctttgcgccaccgtcaaatgtgcagttagctatgatggcagagcagcagcaatattaccaggcacagcagcagcagtactatcaggtaccgcagcagcagcagcagcagcagcagatgacgatgttgccgccccaaacatatcagcagcagtctcagtattctgccccttcttctcaatctggattatccaatccttttggtgatccattcagtagccttgtcacgatggctaatccaccgaagcaaagcaattcaaatttagtctgaattgcatattttgtttctaccgctcccgctaatttttatcatacacaactttgacaattctgaggagcaacttgtatagttcaaaaactttgaatactgtatcttgatggtacattgtactacagtagtgctcacatttggaaagtactccctccgttccgatttataggccgttttggcatttttagatacatatttttttttatatatctagaaattttgcatatctaggtgcatagcaaaagctatgtacctagaaaagccaaaacaacctataatttgggacaaagaggtaatatgatcactgaactgttaaaataatacacagttttgacttgtacaccaatatcagctaatatgggagcatgtttaccatcatacattccagaagtcaggtagcacagaaaagacggtgaaatcataacttttttttatagactagtcttacataaaattagaagatcacatgaattccgtacaattttattttacatggtagc

SEQ ID NO: 5082 - DNA, 5851 bp, Sorghum bicolor
tggatcaaagagaccgtgctatcttttcgctaggaagtttaatcctgaagcacttgacaacctactgaagctatttaccagttatacatctgtttgagtccaacctgattctttgccttgggctgtcaaatcccacaagcttcttttcctgtttgtatgtaaattgtgaagtccgtacttattaggatctgggcccaaagatactggtacaactgcaacaactgtgatggcttggagctcagtcctcggtaaaacggccacagcaatgtttatagaatgacactgccctcatagtatgtcgtgttcaatgtatgtctccatagtcttccacccaactcccaactcattagttctttgaagaacagtttttttgtcagaatgttatactgtcattatatgatccattctttgtagacacagattacaacagatgtaccacaagcgcatagtcttaatttagtcattattaaatcttttgtcatggattctactgaattaggtgttcgcatttcttcattttcactgtgattaatttttcagcaaagtaaacgtatttgagctgctgttaatggaattccaaaacataatatttatattttaggagaggagatgtactagtacagtaaattttccatctcaagatgagacactgtcacgtggatgatgggtccatttgtttattttttttctaggtacattggttttgctatacacttatattatctagatgcataataaaagttatatatatatatatatatatatatatatatatataaacgagaataacttataatttggagtggaggggagacatatatattagagcaattctaagagacttttatcttttgtaattgttaggaatagagattttggtggaaaaaatattcttcttcaacaactttagttggttatcgaaatgcagccatcttctatttggatttctcgttagccaaagatagaaaacgagaatcactgtctagaattcatttaagatgtagaaaagaattgttggagagcgaaaagatatataaagcgatttttatgcaaatgactctctaaatgatgattgattgagtgaattctagaaagagtcttagagatgctcttagatactccatttgtatcggttttagaagtcgtttaagacaacggcttcaaaatacaactttgacctcttgtttttataaaagtatttagaaaaaaaaatatgtatactatgaaagtatttttcaagacaaatttattcatatatttttcacatttacaaactcaaaaatttaaaagttattcaggatttatattctcaatatttgactcaaatcttgtgtaaaacgacttctaaatccgatacgaagaaagtatatttattagaaagatatttcttatttttcctattatctcttcttagaaatgtgacaattaacatctaaatcaatggtctacggtcgttttggtgaaccatagcaaaccattaattgatcaagtaaggccttgtttagatctaaaaactttttgaattttgatactgtagcactttcgtttttatttgacaaacattatctaatcatggagcaactaggtttaaaagatttgtctcgtgatttacaagtaaactgtgcaattagttatcttatttatctatatttaatgttccatgcatgtgccgcaatattcgatgtgattgggaatcttgtaaaattttagatttttggtgtatctaaaaggcctaagcgtatttgagccgcagctaatatagaatcacaaaacataatatttagtatattttaggagatagtgtactgtagacattttcaatctccaagatgagacactgacatgtggatgatgggcccatccgtcttaccctggcctacaatatccacaattccacatcctgtttccacaggcccacatcaggccacgtagctccactagaacacgaacacgtggcaccattctccgctcttccctccaccttccccttccaactttccaaatcacctcacttctcaaaactctcaactgccagtcgcatcaagaaatgctccacttcatctcctcttcccctctccgtccccgattcctcctcctccctagcccaccctccaatcttcgcttcctcgccatgagcgccgccccctcgagctcctcgtcccgttcggtgcgcggtgtggcggtgccggtgccttccctcagcgccggcgaggcctgcgcagtggcagacgaggccttccagaggtacacgtcgccgagcttgaggagaggcggcgccggggtggccgtcgtgtggttcaggaatgacctccgagttcttgataacgaggcgcttctgcgtgcgtggtccgcttccgaggcggtcctgccggtgtactgcgtcgacccacgggtctttgcgggtagcacgcattactttgggttccccaagacgggaggtgaggacctagcgattctgtattttgttcgttgctgctgaatcagggatttgaaatagatcaggagcatgctcatttgtgattttttgtcatcgtagagccaatttcaagcaagcattgcctatttgcccgattagaaaaatcttggtgattaacgtgttttcttttttttttgtgtttgatgaaatgaaacttaatcacctattcagcattgagggcgcagttcttgatagagtgtttaggagacctgaagcagattctgaggaaaaagggcctcgatttgctagtccggcatggcaagcctgaagagatccttccatcaattgcaaaggctgtcagtgcacacacagtaggtccccttctgcacaatcttatctcaatcaattttagtatagttgaattctggaactttaggtactaaattcatgttaggaacctaagattaagtcagtaagcgctgtgtctccagatttatgctcataaggaaacctgtagcgaagagctccttgtcgaacgcctcgttagcaaaggcttggaacaagttcagattgctcaaggaggtgcatctgtcccgaagaagcctctgaaccccaggttgcagctcatctggggagcaacaatgtaccacatcgatgacctcccgttcccagttagcaacttgccagacgtgtacacccagttcagaaaggttgggattttctttgcaaattctaggcctttttgcaggcgtaatggttaatgctgcagcagtggtttttgccaggcagttgaatcgaagtcctcagttaggaactgcaccaagttgccaccgtcgcttggtccgctccctagttccagcatagatgagattggaggatggggggcaataccaacactggagtcattaggcctgagtgttacaaaggcaggtttagttgcagctagttgtgctttaatcaggtgcttcactatcactagttctagttttaatctgtactgttttcttctccctgcagtctgagaaaggaatgcatttcataggaggagagaatgcagctcttggaagagtacatgagtacttctggaagaaggatcagttgaaagactacaaggtgactaggaatggcatgttaggtccagactactccacaaagttctctccttggcttgcttctggcagtctttcaccacgttatatttgcgaagaggtaaggaattcctcattgcctgcagagctcgttagctttgcctaatacaatatgttatatgtcctttatgatgcaggtgaagagatatgagaagcaaagagtggcaaatgattctacatattggttagtgtgcctctcataagttgtactcattgcaggcttttgtaaggtgtattcccattaatatagaatgaagcgccttttcctgacaaatcaatggcctcagggttttgtttgagttgatatggagagactacttcagatttctatcagcaaaatatgggaacaccatatttcatctgggtaaggaccaaatatggtgctctctctcatacccttaggttttgtataaaaaggcctttaatgatgaaaataatgcacaactatgccatttgtgaaacatttcaattttggctggtaaaagtataatccggctgcaaactattattttataggaggtccgaggaaagtagtatcaaagtggagtcaggaccaagcactgtttgaatcatggagagatggtcgaactgggtatggtattactccactttattcttctgaaatctggagccattgttcttgtgccttctgaattcagtcatggtaaattccagatatcctcttattgatgccaatatgagggagctttcagccaccggtttcatgtccaaccgtggtcgtcaggtatccttccaatctgaccacataagcagaaaaaaaagcacagggcttaacactgcagggcacctattcccaattattcatctctcaatcactgcctatctgcagattgtctgctcatttcttgtccgagatatgggtattgattggcgaatgggagccgaatggttcgagacatgcttattggattatgacccagcttcaaattatggcaattggacgtatggagccggttagttatgtctttactgatccttcagatactggatagaacaatatgaccaaagaaaataaattcaagaatcaagaaaactacaaaggttgcttacatatccttgtagactggaactgaatgacatatttctgctgtactctgacaggagttggcaatgatccaagggaagatcgatacttcagtatcccgaagcaagtaagtattcgaccagactgaactctcttacttgaaaaatcactatcgtaatgagccgaatcttaggatatattgccacagcaatatgaaattgtatgttttatgaatcaactgatcacttcaaaacaccaagaagttaatttcacggcatgctagtttgtaactaccagtcgaacctcaacagttggtgaccgtgcatgaacatccatctgcaggcaaagtcatatgatcctgaaggtgaatacgttgcatactggttaccagaacttcggtcacttgcaaaggaaaggagaaatttcccaggggcctcatacatcaggcagatagtacaactgaagtttgatggtggaaatcagaagaaggatcagcaattcaaccggcagagaagaccaaacaatatgtacagaagacaagtaaaatagaaggctcttgattcactcgaaatagaaccatcttatcagtagtagatggaagtaacttttttacataactgattgtagtgtcaacatgcacgaatttctctatggtcttatgcaatgttcattgatgcattcagctacactttatgtttgtcagcagatccagcacaaaagatcaaaagccctaaacattcacgtgcacatccaacacattggtaaccagaaactgaagaaaggcaaacattttcattcaggttacctcattactcaacaacaaagtttataccagtacttattcaccaaaactagctccagtaacaaaaattaccaagcaaaaagatatttacagcactgccaatgagataccctaaacactataataagacacctcacaccttcaaaagggcagcaactcatatatacaagttagccttactgagagaagcagagatacaactacgacatcgctgaatggtcatgagtgataaatgtagcttcaagcgttcgtaaaagatccttttcttgcacagtagcgagcatcgtaactcttggctggtataggaattcctaatggctgatctacattgtgtactttccacgcacagaattgtgcatcatgaacaagaggattaattgcacgaactggtggagatcccataaagtatggaggtgaagcctgcagatcgcaatgtccaa

SEQ ID NO: 5083 - DNA, 9489 bp, Sorghum bicolor
tctgggtgacaactttagtacctcgcttactaattaaggttccttggtggtgacaaactattttgaagcagaagtgaattgattggaacttattctaagcagcactggagatttgctcatgtaccgattcctcaaggttctaggatcatttggggtgatgaaaattgtgaaattcatatggaggtgggtctattatggagaggcatggtcttagtacttaagcggtcaagaacttatgattcacctcgatggatatgaagaaaacggagtagcagcatcagccatcaaggaagtgctattgacatcacggcttgtgtaacagcctaacaccccctttagattgtcacgctgagatcttcctggcgaggattgggagccagatatccttgacgatgatgatgataatcgccctactccatattgtcatattgttgtttgcactcttgcagctgacatgtttcgtgcttttgtgacgtacaaaaatgtgagcattgctcttgtaaagctgcactagttcactaaaacattgttgttttggaatgattttacaggatcagcaataagtgaaaaatggtacccatgaaatccaatctgtgcaaacatcgtagtaaaacaatgtagagtattgctactaacattgtgagatggtgaaaacacaatcaagtttttcaggcgcatggttgaaggaaatttcccagaaagacatgtaatacgataattatatccagaaaaataagaaaaacacagtactgacataagaatcatgctgtgtattttctcgtgccaacgatgttgcactgcggctttgctttacttccgtagtgatcgtgtcgtgccaacgagtacctttctacgaccagcatttacagaccgtagaagccatacgaattacgaaacgtcgtcttggggaagaagcaggatcgaggagccaggagcaaaagaattgagagctgagtagttgacacccgtctgtatgcactcgcgctaaactcccagaaatcctgtatataaatgtacctctgactgtgaaattgcgcaaaaccaccggaatcccacagttcacgtgattgcgtctcaccaataataaaaacaaaaaaatcaagtacattgtgttgtgccacaaatgacctctgcattgcaacatattaaattatctcatactcccttagttctaaattataaatcgttatatattttctagaaacattgttttttctatgcatctagacatagagtaagtctaaatacataaaaagtaatatatctagaaaaatcaaaatgacttataaattcataatttggaacgacttataatgattcggttatccttaatttacgtaatcggtgtaataaattttatgagttgcatgataacattaaattgtataatctctattataattgaaatcttttccatgcaaattccacctgcaagatcaacgactcacagcacatatcctacagatttaacgactcagattagaacgcacgcgtggtgaatttgtgtgatgtatgattgacgcgaggctggaggtgtgtaaggtcgtgatcatacttctaatctgagccgttaaatttgtaggatatgtgctgtgagtcgttgatcttgcaagtggaatttgtctggagaaaattttaattatagtagagattaacacaagtactcaatagggtcctaggaaataaaggacgtcctgaccccttcgcagccgctaatttggacgtcttcgcccttgtctcattgatcgccgcacaatcacactccgcgccgcgaccgcataggcgtgccagaccaaattcgcgagcgcaggtgccaaactcagcgacgaaacagacgcaccatggccaacaatgccacgcaagcaaaatcaaacatgcagcaaaaacagtagtcccagccaggtatcgaacccggggctgcactaggtatgtgagcgttggttattacagcatttcgtaaaaacctccgctaccgtgatttcttttgccctcccctcctcatggagtccgacggcgacacgtcgccacctcgcccgcctacgccggcgccactgcgtgcctgcggcgcgggccacccggcatcgcactcgctgccgacctcggcgggcggccgcgtctgcctctcctgtgccgcggcgctcctctcctccgcgggcaccgcctccacgccatcccaccacgtcgcgcacgcgctcgccaacctctccctggcgctcgccgacccggcgttcctcaggccgctccgcgccgcgcacccacgcttcctcgcggcgccgctcgccgaggcactcgagggcgccgccgaccgccgcgatgccgcactcgccgcgcaggcgtgcgacgtcgcggccgacctcgccgccgttgtgggctcccccgctgattcagagctcgtcgcccgcctcgcccgcgtcctctcctccggctcactcgtgaagcatctccatacggtaagtgcgcggcctgggtcactcacaatttcgtgctatgctgtttgtctcatttatgctgagtaggttggccatgaattatatgtagtggagaggaccagtggaacttgactagtctcactggatccaagctagtatatatatatagccaactggagtctgacatcgaaatgccgcattcctattttagacaatagaaataaatcagatgccttattttttggaactaaacaaggccttattacaaaattgtgtaaccacacaaatgtcccactcaaaactcaattctaacatcataaagtcaccgccccccccccccccccccaaaaaaaaaaaaaaaaaacattgctgttgcctctagcattggatagacttggataatgcgctgcttatgggcttcatcctgctgtaactgtgcccattgctgtagccagtgtgttcctctgaatatatataacctacaatttttttttttgcaaaatgctgcattcctacattaaagccccatttggaacatgttttcttcctgattcctgtgtttttctgtaaaattgaactaattcctgtacaattcatgctgtacaaatgggtcctaagtcgtaagaagagggacccggttctaacaagtgcttacctgcgtatggatacacatgatggtatttcagggttgctcataataggttgactgcattttaccttccatttcgatatgttgctgccttttcttctttcttttatggccttggacatcttttaagctcaacgcaatggaaatgtacacattcacatgtatacaccaaattaagaaatatgatcaaatgattttgtatctaattttagaattgtctaagtcttagtctggactgtaaaagttacaaactaaatatagaataataccttatttggttatacaactaaatatactagcagtagttgtatccttgacacaccagtacaccatttgaagtaaacatagtactggtggcaggatatgcagtgcatcatcattctaattgattagtgtcactcctggagatgtgttcatagtgctctagatgtaagacctacaattaggtttcagtgtatggttggagggcgatctgcttcctttgcctgttattgtaattctggtgaactaccccattttgtccaaagtggcctgcagtgcttttatctcatcactcatcaatcgtcgcttgagtgagatagactggatccattaaagatgcgaggcacagtggttcttctcttataacttctattgaattgatttaccttcttatgtctgtatctttcttttatgtcagtgcagctacattgtttggggcttttgctaaactctaccaaagatgctgcagcatatataggggacaaatgttctcttttcttaaaccttgttaatgatctccgacttccaaggtgaagacaactgaattctgatgattatttcttgcttttcaaacaccttatctggcagcatctttaactttctctatacagcgatgaaattcgtggagagatactctttgttctatacaaactcgctatactaaatgccaccccatgggacaatatatgtcaaattgaagatttggaccttctggcaattggtagaagcttgcttcagctctctcttgaagtcctactcaaaactcaaaatgatgctgttcgcctgaactgtattggttggtatttcttctttttgtactacctaaataatagtactttaagaatacttcattttgttgaagttactgatgtttgaactttcatgtaatctaacaagcaattctggccattaatttttgtcacaatttgtacataagtttacagtcttcgtgactaattaatctgctcttaatgtaaagttgtaaacactctagatatataatccatagttaaagaagttatatggctagcttcatatagtttgagaaacttgagagtggtttgaaaagacaacctgacatcaattgatgaatgcatcatttctgatgttatacaagaagttcgatgagaacaatgaacttctggatccagctttaataattcagtgttactttagtttaagagttggctaagtaaggaggaaaaaaatattcacaatgttgactgagcaccttcaaattgtttgcggttataaaatttattgcactaagaaatttttgatttggtttttaaacaactcatcaatgttgaaaatttccacaataggtcattctccacttgttagtgatgttcctttttttgtgctactgcagcattgctccttactttagcaaagaaggagccctttgatcatttgctgattagcttccagagttctaacaactgcatagaagcagagtccatgcagacagattatatgtccctgaatgcttctcttgttctattcgctgaggctgtcaaaggatctctgctatctactaacctagaagttcagacagggacattggatttgatctttcatttcctgtcatctgatgcaaatatttgtgctctacttcaaattttgatcgatgaaaatgttgccgattacatatttgaggttctcaggttatcaggtaagttcacctttttgtagtcatgaacttctttctgaaagcttttatgcattattatgatcaagaaggcttacaaagttgcactcctgttatacatcttcaggaaataatgatctacttgtcatttcctctattcgagtactattactttttgcgagattggaggaaaaattcaaagaaaagcttgccattggattttccactcttcttcctgttcttcactatgttgcagagataccatttcacccagtccagtcccatgttttacgacttgtttggatttgcatggtcaattgttccggtatcctctcaatgccccaagaagaacagatagcctgtactttgactgcaatcttgagaagaaatgtcaatggtgaacttgacatgagttctgaaacttttattctggtttgctcaatattaatagagattctgaagtcacctcatgctcatgatattgagaaactaccatcatttattgaagaagcatcaaaatatgcgatatcttcaacattgtcacatgagtgtgattctatgatcctcattcttcattctcttcttcttctgaaagaagcacttatattctgccttgaagggagcaaatacagtattgctagcacgaaggatcttgaggatagcatcatgggaacttgtggaactattttactgcaatggcttcaaagtgctgtggttgacggtaatgatgaagaaacattggcagagatccttcagattttccagattattttgtcaagggcatctgacaaaaagccgttaaagtttgctgaattgctagcatcatcatcatggtttagcttgtcatttggattcatgggcttatttcctactgatcgtgtaaaatcagtagtatatttggtcactagttcaattgttgacagggttttgggatgtaattatggagaaacaattcgagatgcacacatttatctaccatcagaccctacagaaatgatgtatttacttgggcaatgtagcacagaagacttcaacttggcatcatgccaatgtgctattctttctatattgtatgcctgttcattctacaatgaaaggtactcatctgctgctgcttatagttcaccatttgcaccttattagagaaacatgttaatattgcaattcttttaactattcaggctctgtgctaacaaccaaattctggcttctgttgagcaatacatcctcctcaatggtgggaacttcccatatgaaattaatggttctattatgcttacgcttctggtccatctttatgcctttgtcagaggcatttcctatagctgcagcattccatatagtccagaagccgagaatacactattccacttaatcatacataaggactgggatttgcttgtgacccgagtccattcggtagcaataaaatggctctttcagaaacaagaaattgtggaaccactcgccttccagatgctaaagttttgtaaaactttctgtgaagatgaaactgtcatgctctcaaacagcagtcagtcggtggacatacaaatgatttccgagcttgtactttctggagaaaccaccatctcatctttgctggtttccttgctagaccagatggtaaaggagggtacagaagatgaggtattttcagtggtcagtgttatcgctgaaatactcatgatctctccgcgttcttctgatcagtttatatcatgtggtattgtcggttcattccatggcatatattgcttaccatactcttcaagcagcagaacagtttgttcctatttgatctttaacatcttacgttcagcaagtgcatcaacatttggccaggaagatgaatggcttcctcttgctctaaaggtactcttattctgtctatttgagttgaaccttgtaaattacattcaagtaatattattattcgctggctattaatagcttcatgggatgttatttggctaaacttgtggatatagcaaagtaggttggcgtctgggtctgggtgtcggtcgcttgtttcagttctaacaggcgcgtatgtaatcacagaacgttagattggtgtatgtagtgtgggcgtttcagtgtttgtggttgtcacttcgtgttgttccatttttcttcttaatgtaatgatacacagctctactgcgtgttcgagagaaaaaaatccagtgcagcctttgtttggattacttggtagggatcccacatcattaatgcttagttgtctgtttaggagtgcagctttccaaaaagaatgcatcgttagctagtatttcaatttgtatcattattggttagatttataattcttctgattcagaaattacttctgtttgcagttattggaatttatcacttcgggtattgactatacatctagtggccaagaacacaagatagtagttgggatactatgccttgttttgcatcattcatcaagtgaatttcttattgagcctgcaaaagccataatcttgaacagttctttggtttctttaacggatgccatagtaaacaaagcttgtgttaaaggcccatcattatttcaacacaaccaggagacaacctttggagaattcctgattcttgtacttctattggcgttcttctctctaagaaggtatgaagctgttgcttgcatgcttcattttatttgcttaggtctgcactaactatggtctgcattttcactttccagtttccataatactccataggcactaattgtagcctgcgttttcagtttgcatattctagaggcactaattgtattcttcgttttcagcttgcacaccattctagaggcaagtattgactggcaggacttccttcagcattcagatgatgtccagtccttttctgttctcggcattccatgccatgatttatgtcgtctcatgcactttggttcaccttctattaaacttattgcttcacaatgcctgttggagttgctcaagcgaatttcagatcaaaggtcatgtattgatgctgagttaagatgctctacgaaatatttgaagtccattattgcagtgacagagggtttgttgttcagtgaagacagtaaagttgctggaaattgcagtgcctgtctctctgtgattttaggatgggagaaatttggaagccaagagaaggtggcagtcagagaatctaaatggttcaggctaataatggaggaatttgttgtggccctgactgctcctggtttgacgtccaaatctttcaccagtcagcagaagtttgctgcaattatagctgtttcgttgctcaggctgagccaagtgccagattggctgacatcgttgtttgatgggcatctgatatctggcatcgtggctaatctttctgctaggaatgttactgcagaaatcgtcattctcttcagtgagctcatggctaggaagtatctcagtcaagagcacattgttgatctacataacttgttccaggtttgtacaagtctctttgtagtgtagccctacaaagcatagaacatggcattgtaaagccatacttactggtacaaatagttttacaggatcaagttcatgtgttggttcaccttttgaattcccctgccgtggtgtatatctgattttgtttaataatattcatacataccatgtgcaggtgtgcagaagacaggtctacgagggaagctccaaagcagcattgccagagcaaagggttgaaaaagtcgcgagaagcaccaatgacgtgctcgcatcgctctttgccctgatgaaccagtgcgcagagtccggcacggttcaagcggagcagcagagactcctgcgtgcgattgacctgttcttccaggagtctagcaggagagaacagcaatgttatgttacagctacttccccaccacagcgccaagacacaacaatgcctggggattctggaccaagacagggtcgcccaagcgtgaacacatccggctcagaatggatccggatccggcccgagtgagcctacatacgcctgcgcgcgtgaggatgccgtgccgaggctcgtgtttgggtatgaggagtccccgagctgtaaatgggagcaggtttcttcgtgttaatcattactccgaactgtcctactcgatcttgtactttgatgcgaattcctgcctacagtacgtattgcttacaccttctcaaggctcaaaagatgaacaggaggaaaactgtagtgttaggcacctaaaacttttcatgcatcctatcgaatttttggatacatgtatcaaatattaaatatagataaaaaaactaattacatagtttagatgtaaatcgtgagacgaatcttttaagtctaaccactcgccaagactcgtggtaggagcctagcttgcctgaatggacgcgtcgcgcgaccctgcttgcaatacgacgtcccacgcagccggtgctgcccgccggccgccggccaggctcttgtgtcccgccttgcctcgtcgcgtaccgagcctcgcc

SEQ ID NO: 5084 - DNA, 2743 bp, Sorghum bicolor
gtgaaatatatttttatagcatgtatctatttagagctgtaaagattgatattcttttctatatcatagataaatttaatatagttcaacttacactaaacctacaatcacatccttttctgggacatgtgtaattttaaacttatcatatctaaagccataccttagtactcatagatgtgaatgaaataattttatgattgtcgtatctatctaaggaagtagatcctctaactttggtttttgtgactttgaatcactggtaggtggacctgatatcaaacccacatgctagtgactcagtcacacatgccaaagttagaggaatctaagccacactttatgagggtcaaatttagagtgcttattacatgcctcgcgtttaactgttttatttatttaattttatttttaaatgcaatgatatgtgtagatctcttagttatttaaaaaaaaactatgcagtttatgcatgaatgtgtgacctcagtaaaaacttaaagcggacagagaacagtgttttttttgtgatggtcagagaacacagtgatttgtgcgagcatggtccaaacttgtggaccgaggtgacctaccccatttttcagctagcgacagcggcgccgggggcgtctagcctggcttatagtattattaggtgcgagtgctagtgtgtggcggcatgatatgatcttcttttttctttgattggcatggagatggagaggttggttggcagtaataaaagaatctgggctagactggagcacatccaactgctccagacaaaatccaattcacaagtgaaaaccaaaaatcaagagggatagaatagagagcctgctttatcttctccccctagctacctttgtctcccttgctcactagataggttcttgttgctgaatactagtacagtacagatgactggaatggataggctgctgcaaaactgagacggaataaaattggcgtgattccctgccatttccctctcatctatctctagtctccatccatccgtccatccatctatccaggaccaaagtccacagttgtggtgcatgagggacctagaagaatatggcagagcctacacacatgaggctttgcagggtgagtcctcccaccagttgagctgtagtccatggctgatagcttcatccaaccttggcatgccaagagaggggaatagaggggaatattggccttgtttagatgcaccccaaattacaaaagtttacaggattctaaatcacattaatgaagcattaaatatagataaaaacttagtaattacacagttggtacattattggtgcattagtgataaggtctttggttgcactatacatacatttcatttcttttgacacattggtagtttgtgggtggtgcaagcatcgcactaaccatttctatactaacagcaatagtaatttattgcaaagtgcatataatacttcatgactcaaaaatgtgtgcaaaaatataagtttaagatatttctcacatctgcctttatggtgtatacaataaataagtaaaagaaatacatagataaccgttgggtagtaggaggagtaagtggtagtagtgacaacaaaaggagagagcaggcacgccgtccccttctccctctataaaatccagcttctccccccttgcttctacctcactcttccactgttctcccctaccttagccgcccacaagccttttagcagcttctccaggccgcgctcatcttccttctctaggtgcgtgctcatatcatcgccaggatttgctcagccctctttccacctcatgcaccggcgtcgtctctgctggctcggccgtttcctgagctagctagctgatcgatcgatctccatcatcgagctccctcgtcgtcgtcgttcaccgtgggacgccatggaggcagcaggtttggtcgatcggctcgtgtgtgcctggctccctgtatgccacacatgtagcccaacccgtggcgtgattggatgctgtgggtggcgtgcaaggagccaagcatgcataacaaggccatgatcacctcctctctatcctctgatctgttgaatttcttttctgttcgttttttcgagatggtgatgcacttatttgatgctagctattgcatctgtatgattctctttgtgcctgcttgggttcgaattgtttctgcaggggtagaatttaggattaactcggagaaggcaggtgtgttcctctttcaaagctagcttgatccattgagatcacaaaattaagagagtttatacagctcacacatttttcgtcataaaaacatctgctttccttttccttacatggtccgtgtcttaatttgtttggtttattacggttgtatattcatagaaaaccaccggttgtctgctagctagatgtagtccatttgatcaccgatctgagctatagctagagttgttcaccttttgcttgttttgatttttatctcaacaaccttttgtggccacgggaatttgtagtgtgcgcaagtctttttgtaatttagttcgtcagttttcgtctggactagtgtgcatctgaaacggacttagctgtatttcgtttgcaaaactgacacgtacttcaaactttcggctgcaaatggccaggtgtaatggcagcaagcttcagttactactttagtagtacctgacggtagtagtatgtttgaccgagaaatttgaatatacatgtaattaagctaggccttcat

SEQ ID NO: 5085 - DNA, 4204 bp, Sorghum bicolor
ttcttagccaaacggactagtctatgtgactcaaatgtccatctcgtcacacatgtacgtctggttgttctcagaacagcttcatagtcatgcatggctacattgcgagcagccaaactgagatgaacgcgatggctacgtgttggaataatcttccagtggcgtcaaaattacaggcggtccaaatgagtgtggctggaaccgacaacgaaacagtataatgttcaaggcacatgctttgttttctacgatctctgttgagttggattaaatgatttcatatctgttaaaaggggagacggattaaaatcaaaattacaggtggtcccaaatgagtggaaccggcgatgatgaaacattaaaacattcaagacacgtgctcgttgttttctagtctctgttgaattgaattaaaggacttcatattttcaaaaaggggaaacgaattaagatcaaaattacatgcggtcccaaaggagtggaaccagcgacgatcaaacagtataacgttcaatgcacgtgctcgttgttttctacaatcactgttaaattgaattaaaggacttcatgtctgtagaaaggggaaacggactgaaaatttgtctcaatattttgcaatttttcatattcccatccgcttaacaaagctgaaaatttggtgattctgtcgattaacctctaatgtgcgtctccaagtgcacgaatactgcatagatgccatgtaattcgcgtggactacagcaaggttaatcttctaatttcttctctactctgagtacaccggccgtaccggaaatttcaggggcgcctcatcttccaaagataattggcgtttctagaagcctctaaaaataccatattttttagagatagctctaaacatgaaccgtcgcaataaaaaaattactagatgcaggtgatatttttaactgcatctcaaaatactgcctctaaaaatagatgtagcaccagaaatcataactttttcaactcaagtttgattgaagaaaattttctgtcaaagttttagacttcaaagagttcttcaactttttgtagttcatgaccttttaattttaaatcatttggagtctaaaattatgttttaagttctcactagtagatccatcacaataacaacaataaaaggagttttacttctctttccctttgtcttcacaaagcttggtaagaacttgttcatagtatctcgatgttggtctcaatgacttttttgtgattagcaagcctcttagcataatcaccaagtataagaggaggatcagaggggcttacatcaatttttgaacaacttgaaagaacagctttcagaccgacagcgtaccggcctgtcctccagcagcttgcgaggattctctaggagttggttaatctttgagggcatgaacgatgttctccagattcctggattcatcgcagcgcccttcttcttgccgtccattgtaatagtgtagtttcacaaaaaggtatatgttgacgcaatgagtcacaaaccgagagagctagtgatgaactctcaaaaacctgcctaaccggttctagaagaggccgagcataaaaacagggttaactggtttccagagctggttttagcagggagtgccataaaagttccgtgaatgcctctaaaacccaggtcagcaaaggcacctagatcatccgtgaatctcatcgtgagtttgtgacaagcgtaaaacagcacatagttgtggttggaagatattagagtttgttggaagatattacagtttgagtaaaaatatagggtagattggatatctctgtcggccttcagcctcttacatgcatgtacagagagaaggaggtcgtatcccactagaaagacgaatgcccaacgaaatttatgcatttccaagaacttgtctcgaactcgaccaaaaccggattagccgattttgacttgtccacttttgttgtcaagacgtgctatatatgtaaccacctacaaacccctcaacatagaacaaccagccatcagaaattcaagatcgatccatccatctgcacaataatggcattgctggatgagtacagcagcgatgagctactccaggctcagcttcagctctggcaccaggccctcggcttcttcaagtctgtcgcgcttgcagtcgccttagacctcggcatccccgacgccatccatcgcctcggtggtgctgcaacccttcctcagatactcgcagaggctggggtcaacccccgtaagcttcgcaacctgcgtcgcatcatgcgtgtgctcaccttatctggcatcttcagcatcaaacaggcagcaacggcggcgtcagacggagaaggtccagtctacaagctgacgacggcatcccgcctcctcgtcaaagacgagagcttgacgaggagccagcagctgcctcctgttctatacacgcacctcatgctcacaccttgccgagaatccacggccggcatgggcataaacgcgtggttccggcaggagcaggatcagccgcagccagcggcgggtccattcgccctcgagtacaatggccagacggtctgggaaagagcagagcacgacgccacgacgttcccgttcgacgacgccatggcctccgacacggcctttctcatgccgatcgtcctcaaggagtgcagcgaggttttccatgggttaacctcgcttgtcgatgttgctggtgggcttggcggggccgctgctaccatagtggcggcgttcccggatttgaagtgcaccgtgctggatctcccacatgttgtcgccaaggctcccactgacaccaacgtgcattacgttgctggtgacatttttcaaagtattccaccggcaaacgcagtgttcctcaaggtacatacctcgcattcctgatatttcgcatgcaaattgatcttgacattaatttcatttccgtatgaatgcagcaactagcaaatacaccaacgtatatacagttatgcatctaaaatcgatcagaacgcaaaaacaaacactgataacgtcatgttgatgtgcttccttttcccccttaaatgacaagctacatatatacacacacttcaaataattgcttataattttgcttggttaacttgatgaatggctgcttgtttcatcagtggattctgcatgactggcacgatgatgagtgtgtcaagatactgaagaactgcaaacaagcaatacctccacgagatgcaggagggaagataataataatagatatggtggttggatctgagccgtcagacctcaaacacatagagacacaggttttgtttgacctcatgatgatgaatgtcaatggggtcgagcgagatgagaatgagtggaagaacatcttcttcgaggcaggattcaaggactacaaaatcataccacttcttggtgttcgttctattatcgagctctatccttaaagctcagtgaaaccatccataacaataagagcatcgatgggaacatgcatcaatagctgtggactgttgttttttatattgatagagtaacaccgaataagaggatctcctatagatatggagggattcgtatctggccgggcatctggtcagctcttcttggacctagctagagtcttattatagacaaaagtttgcacacatatatatgagtgcgacctccaactgtaaactggcgaatgacaaaatgagtttgtcttttgatatattgtgtttagtagtaatattacgacattgaaaatatttctacaaaaacttagtaaaactaatgttggggcaaagccctcacagcagcacccgcctctccttcattaaggacagggcccttgccaatattctttaccacggagccctcgctagcaggccttgccctcgtgcaaagaaaccctcacggcttccatctaaaccccattagtgtgaactcgctgctacttttgccaatagtttcaagccagcgaggtcgttcccttcgacaccctcgctgggactgcatatgtctccttctttgacctccctggaaaaggtatcacagcgttctatcttgcaaggtccagggatggctatgaaatcggttggccatggacaaccctcgaagtctccccacccgacatttctgtgggagcacgtcaaaatgtgcccccctagcaggagaccctaatggtgtcaaatgggtagttagaagtggggagtcaaatgaccataa

SEQ ID NO: 5086 - DNA, 4347 bp, Sorghum bicolor
agtgctcctaggactagatagaaatgctttgcttagtgaaccgtcctcctaaaaaataggagggtctgtgaattatttatgtagtaatgtgatatacaaagtgggattttatgagtagaatgagggattagggttcatatgatccgaaagcgtctatgatgagcctgtttgctcgtctgaaaagctatggctaaaaataatgttcgctgattttatcatgagagaaaaacactgttgatgttcaaacatgacaaaaataatagatgccgacacttaccgatgtgacagtgtccaatgcgtattgaaggatcattatcttctatgcgatattttataatcatttatgtaattttcagctaaaatctgaaccatgcttgtgggcatctcacatcgtgtgactgagtactccaccactacactcgcagtcataaggtccccttctttctgcctcctatgtggtcagagcctcagagggaaggtatgaaatggctcgatccttagtaatggaagatttcaatttgggctagagggcagtttaaaccattatggtttgtatgcattgtttaggacaagatcaatcatgatttttttttggcaaattacaaagtagactttcatgctctttttggcttttctttactaagatacaatcatacaagtaaaatcaaaagtcataaaaggttacccgagggaaaaaaaactatagagattctcccatcccatatagagattaggattagtgctgaccataatatatatttctaaacagctgtgaaaaaaaaaacttttgagaaaatcccaatccttgattgacacatgcatggatgaggaaagagcaagaggaaaagaaaaccaacctttgatggtgccaaggaagccgctgcagttggtgtccatgggaatcaagttgagcttggttcccttgagcaccttggcgtccgcgttgacgtcgtcgacggcgagctcgatggcgagctgcgcggcgcggccaatcgtggagtcgtacgtgaagagcgcgcccacggccacctcgctcggccgcggccccgccgccgacgccgcggcggcagtggccaagagcacagtcaccaccaccaactgagccgcaccccccatcgccagccccaacccaagcaccgcccacgcactagctatctaaagcaccgtgggcgccgccgccaccgttgtcgggagcaccaccaccagtggcatcggcgagtgcgctgcttgggaggaagatggcagaggaggaaggaatcagaggcgctggttttgaggtgcgcaaggaaagaggaggaggcgggtcgctagcagtagcactagctagagtgaagacgacggctctggcaagcaagtgccagccaaccggtgaggtgacgccgacgtgctagccatgtcagggggggcgcgggccgtagccgtcgcccatcggacgggcggaggtgagccagccagcgagcggtgtgtgtggctctgcttcctccgtcgttcgatctcgctgctactgtgccatccatctgacttatacgtcaagatcagagctcctccgtggcctggcggcgggaccgggaggaggaagcttcaagctcgcattgaagagtgtatcggaccggagctcggctcgatcggtactgtgtgcatcaggaacaggacaggactgcaggagtgtcactgtgtcagccagtcacgctcacgctcacgcaagatatggatcagcaagacaaggaaagaatttctccctaatcgatcggcagggtgtccaagcaaaaggccggctgcctgttggattgaaagattctttgagatttcaattgggcaaagtgattccgcgcgctctgtctcctctcatctctgcatttccctgccttcgagactagcgctttcgtgtcgtgtactacagctcttacttaccctgataccctctctaaacctcctcctccgatcttcctcctcagctccctcgtctctatatagcgttcaagtgcatagcttactacttaagcttattggaaaattggagttcggttcggagtagggcattgcatttacgacgaagatcgagcttttagtttgcttgttcacaaactgttgttcttgcatgcaccatggatgacgacctgaaacatctgaggtagtaaaaattgcaagagggcttctgtcacttaattagttcgtctattggcttctattaccttcattcctccatcttggtgctcaaattcacaaccatatacgcggtgtttgcacagggtcagcttctctggggtgaggcaggaagatcgtggccgccgcggcggcgagacaatcccaacaccatcttttcagcaaaggacgagttcacgcagaggtgaaactaaaatagttgagacatgtgttgatttcatctcatctacaatgcttccaacggttgaaaaaactgttgaggcaggtgactaatccaagctcgcatttctgtttagggtcactgagcaatgcagaggagtacgacgcggcgtatgcagccacggtggcagcagtggcatacgccattgccgcgcgagaggaggagaggctgttagcgtctcaagagagtccgtcgccgtatgctgccgcggacaagctttcgcgtggaaatggaaacaagcagcagcgtactgctgctgctgctgattccatggatgagcttgctcggacgaccacgccgcagtccagcaagtcaccacgtacacccaagagaggcgagagcctcaagaagccgattttcgaaggcggcagatcctcttcctcgagatggttcactggtaaagagcccatagacgacgattaccaagatgaacaaggtggtatatatactatctaactgtaaattttttttgaaagaatatctaactgtaattttgagcttttcgatctttttgctgacatgtcatattcatttgggtgaaataaaatttcagctaatgtgtcagtgaaacggataagactgccggttcacaggaagccagcacagggtgcggtttcagacgaaaggccccctgtttacactgatcctgcaccacgcgtaaagaaggaccccagtttcacccggaaaccgtcggaaaagagaggaagcaggagattcgagcaggatcagggcaaccagacggcgccggcacggccaatggacaagacgtcgagctcgtattcggcgggcggtagggagagtggtggagctgctactgctaccacgtcttctggtggtggagtggcggcgttctctagcgaaaacgaagccatggcagatgcttgggagaaggagaagctggcgaagatcaagaagcagtaagcgcctaagcggcgatcagtttgatttgatgcatgtttacacttgtttggagatgcaaattcgactggtttaatttgtttgatttgatttgacaccaatttctgccaggtacaacgagacgatgcagacgattgctgaatgggagaccgagaagaaggccaaggccaagcgccagaaggagctgaaagatgaggttcatttcgctctgcttgttcagaatcagaagatttttcagaacgtacgaccttgtttagttttacattaatcttgtggattggttcctgcttgcagagtgagtcggacaggaagcgtgcgaaggcgctggaggagtacaacgaggagatgtcgaggatcaacaaggtggccgcggcgtcgaggctgacggcggaggacaagaggaggagcgccgagaggaaggtcagggacaaggcgcacaccataaggtccacggggaagcttcccgggacatgtggctgtttctgatcatctgatgatgaaaccgctcaccagtccatggtgatgagtcaatgtgcatagtgtatgtgtacataagcctcgatctcgaccggcaaatggatccatttgcaactaaatcgaaagggaacgacatgaatatctgagcatagatgtgaggcaaatcatctttgttcggaatttcagatggctgacaagcacctacgaaattgatttttagaaaacagcctcgtatttacataggcggtctaaaattgtctatcttcaaaatattaataaactttagagtctgttctatttatagaggtggtctaaaaataaagatctctaaaaataaaactgacttttatagagtctatctcaaaaaataaaagcccaacttaaagttttcaaatatgtcctcctcttatctcttctctcggttctttctcttctctctccccataacaggccttaatagccttcactatcccactgcttgtctctccaccttctggatcgagtcagaggcatggcagcgtggtggttcatattgagagtgtggtggatcttgtgacaacaaaggcaaa

SEQ ID NO: 5087 - DNA, 11012 bp, Sorghum bicolor
ggctatttgaaatgtttgataaaaagatgctaataatttacgatgaaatgtacgtcagttaacgcattgaaatcctaactcctttgattttctatggaaattatacagagaattttctttttgattcaaattatactgatatttccattatgtaaaaaaaaacagagatttctgccggcggttccaacttgcctgatggagagccatgtggctttaggccttttattaggcaggtctagctaggtcgatgccggactgacattggctattctgaaagtgatggaagctttgctcgtctagctaggccttttataatacttgccaaatttcatgaatccggcgtaataaacttgctggtgagtgtggaacacacattgggccgggggagaacttttttttgaatttcgggggcgaacttttaatcttgggggaaaaaaaaagagatgtgtttgtgatcagagcaagtaacttattgctagttctggttagtttttgaaaagctgctcgtcccttggagctggagcaaggaatcctgacgattgatgtactgctcatcatcagcagatcgatcaaaagtccaccgtccatccatggctactcctagtactgtgtatttgtgtaccagtgacaagatcctgaacagtgtgctgaaacggaataaaggggcacgatttcgacacgtgaaggccttcctgcccctgctctgcctcgtcagtcatcatccttttcgcctttccttgtcgcgtaccactcgaataaatccatcctcgacaatgccaatgcatgatcgatccatcatcatcgtcatcctattcaattcttccattcattccaattccatggctgcaaatcgcccgccgaccgtacgtctcctatagtatctataccattccttgcaaaaatatctccctgtctacgccttccttccctccctccgacgctgttgactggctaatgagccccgtgagtgactgcgcaacattatgctctgccctctcccgcgttagtttcgctaaaatttagaaatgtcatgagagaagaatattgtttttttctcgaatacgtaaaagggttgtgtatctttatattaagaagtgaaaaagttcggtacactctgggctagccggacactctaggaattacattgaagaaaaggtggaagctagttaccccgacgccgaactctataagtttttcgtacctgcattcgcccccgctgttccgcctccgccttgatcatcatgacgagctctggaattgtggttgcgatacgtctgaagcatcgcgtgttgcgctcggggcgtcggactctccgtcgcggtcgcgccgaggctggctgccaacgtgactgcgaatgccacgcatccatgccagcgtgaagcacatgttggcgccaaccgatcgatacgtaaccggccggcgttgctgtcgccgggacacgcaacggaggagccttggacgcgtcgtaggtacgtagctggctgctgtgaatcggaatcctgatacggcagtcgcccgtcgagctttcgtccatcttcctgacctgtaatcctttcctttcctgttccagtgggaggaagagagagccagagagggagagcagagagagtccggcttgtcatcctcttggtgccctgcccacctggtctggccaccacctcccccacacactcacagcatcttgcttttcccttccgacggtggcactctttcatccgccaggccaggtgcccaggtcctcccaggctcccatcaccctccaagtttggccggccggccggccgtgagaaaccaaaccaaaccaagcccccttgccgaaccccccctgccgcgcattgctccaagaacccgcccacccgatgcgacccgccccaagattccggctcacgacggcgccaggtgctcttgctccagcgccgactcatccggcggtggaggcctgaatgaagtgaggctccgcctcgtcgcctcggctgctctgggttacgtaggcccattcaatgggcgcgctccgggcgatgctcctccgccgcttggcgctgctcgccgtggccgtggccgtgcccacggtcacggcggcggcggcgccgcccagcgaggtggccgtgggcgcgctcttcacctacgactccaccattggccgcgccgcgcgtctcgccatggagctcgccgtcgacgacgtcaacgccgaccgcaccgtcctcgcgggcacacacctcagcttgctgttccaggacaccaactgcagcggctttcttggcaccatcgaaggttggcctcctcttcctcctctttgcttcccgtctggctagtcttctcggctgctcatcttagtacgtactattagtgattgatttccagtgcaaagaagattaaacttagaataccgattttgttttcttattcttaattttgccttttctttttgtctgggaaaaaaaaaaagaagagcaatggttttgattggaggtcagccgtgcagaataaatgtttgtttgctaatccgagtgatcaggggctgctaaattagcccgaactgttctctttccattggaatgattcgacctacagttccaactattcacaaaagtgaagtggtgaccacgaagaaaaaattccagctttagcgctagcaccaagcaaaaagagggtaaccaaacagagtaacgtgtgagtgctcatttctggacttctttagatgtttgttaagaacctttaccctccgacaatttaagcataataagcctccttgatagttgatacatgatagtggtggagacgatgccagcagaatctgacttgtgcatgtgttctaggtgtggcgggccttgtaaaatattgatctgcaatcttcacgcccttaaagaaacaaagtgggagccatacttgattcagaatgctgcacgttgatagttactaattagtaattatacagtaatacttattagtagccttgctttgttgctttttatccgtcctcttttgcagtatcgagtcttttggcacatggaggaagaaagtatgttcgcttcatccatttttgtttctgaaaactcattcaattcgcagtttaattgagttaccactgttggactgtttttttttctgtttgagagtccctcttggattaggtaacccatatttctaggacctaagtgttgactgccaagagacattcctttcagtgtattattattggttgagtgtctttatctgtctgaactaaggtcaaggtgccctcttgctcattatttatacttgccagtcctcccttattagtctaaatgcaataattgcctgcctcgtatctcatgagatgatttggtaatgtttaaactggaaatgaagaaagcaactgctacttgaaattatgatgacgctgtcctttcttgagagttttgctaaccatactgtcctggtaatagacgagaaacagacgaaaagcataccggtacagtggtaccacaaatggcacaacatatgaaatctcttgtggtattctgtatggtgcaagagacgtgcctcaacaattaaggggcatctgagccttcactttcttctcatgccagattcctttttctttcttgtgtcatatattgaagactgctcctctttctgtgaagcaacactagttttcctgtttttgtcacatataagaaagtttgattaacatgagtcaagttttaggaagttagatcgtataagcagaataaaaacatacagaagtgaaaactttgattaatcagctgtacctgctgctcacttggactgattcatgaaaattttacttgatttcagcattgcagctaatggaaagaaatgtggttgctgttattggcccgcaatcctctgggataggccatgtcatctcccatgttgttaatgagctacatgtacctcttctatcatttgcggctacagatccaactctttctgcatcagagtatccgtacttcatcaggacaaccataagtgactacttccaaatgaatgccgttgctagcattgttgattactatcagtggaaagaggtgactgctatattcgttgatgatgattatgggcgaggtggtgtgtccgcccttggtgatgcgcttgcagcaaagagggcaaggatttcatataaagcagccattcctccaaattcaaatacagatgtgatcaacgatgtactgtttaaagcaaatatgatggaatcaagggtcatggttgtgcatgtcaatcctgacacagggatgagaatattttctgttgctaacaagctccaaatgatggccagtggctatgtctggatagtaactgattggctagctgctgtcttggattcctcaatgcctagagatcgtaaagatatgagtcatcttcagggactaattgttcttcgccagcacactcctgaatctgatgccaagaaaaagttcatatctaaatggaataatgcagctcgtaatagaagtattacttatggcttgaactcttatggtttttatgcttatgactcagtttgggctgttgctcgtggtatcgatcaatttctcaatagtgggcagcagatcaacttttctccagatccaatgttgcatgattctaatggcagcactttgcatctatcaactctcaagatatttgatggtggtgagcagatgctacagcaacttctgctcacaaattttacaggcctaactggtccagtccaatttaattcagatcgcaatttggtacacccagcatatgacatcctaaacctcggtggttctgaatcccggttgattggctattggtccaattactcaggcctctctgttgctcctcctgaaattttgtatcagaagccaccaaatacttcttcacttgtccagcggctccacaatgtggtttggcccggtgattccaccactactcctaaggggtgggttttcccgaacaatggccagcctctaagggttggtgtcccaatcaaaccaagctttaaggaattagtggcaggtggaaagggccctgataatgtgactggttattgcattgatatattcaatgcagcagttaaattgcttccttacccagttccatgccaattcataacagttggggatggcagaaagaatcctaactatgatgccattattaatatggttgccgccaatgtatgttctcattcttttttcgttgtatgttaccattttgttgtcagtcctctgatttgttttcatttcatttagtcccttgatgcagctgtaggcgactttgctattgtgagaaacagaacaaagattgcagaattcacacagccttatattgagtcagggcttgtgatagtagcaccagtgaaacaagcaacttcaagtgcctgggctttccttaaaccgttcacgttggagatgtggtgtgtaacaggtgctctttttatttttgtggggatagttgtttggattcttgaacatcggagtaatgaggagtttcgaggctctccacgacgacaacttataacaatattttggtatgcttctggctacataggaatgtattttatcctgggttaccaagtcgaagcttgggtcgaaattcattattttattggtgatttttttctaattgactgacatttcattattatatttcaggtttagcttctcaacaatgttcttttcacacagtaagtctgctagatccatcacatgatattatgcttaattcgtccacgatcctttccctgtctggatggaaacatcttgatgagaatctcactgcaggacagaacactgtaagtgcgctagggcggtttgtgttgatcatatggttgttcgttgtgctgatcatcaactcaagttatactgctagcttgacgtcaatcctcacagtccaacagctcgcaacaggaataactggaatcgacagtttggtttcaagtggtttacctattggatatcaggatggaaaatttaccaaaaattacctgattgatgagctcaacattcctgagtatcgattggtaccactaaatacaatccaggagtatgctgatgcccttaaacgtggaccaaaagacggcggtgttgctgcaattgttgatgagatgccatatgttgagatcttcctgtcataccactgcaatttcagaatagtaggacaggagttcaccaaggagggatggggctttgtacgttcctcattcttatttcaatttttttctgtatttgttcaccttgtttcggtcactcctcccatttcatctcatggaagcataaatccctgtttgatacagtaattgaaataattattcttctccattgttctttacaggcattcaagagagactccccccttgctgcagacttgtcgacagccatccttcaactctcagagagtggccagcttcagagaatacacgacgagtggttcacagggcctagttgctcctctgatgacagcgaagtgggagcaaccaggcttggcctcggaagcttttggggccttttcctcgcgtgtgccctgatatgtctcttggctctggtagtgtttttcatacggatatgctggcagtataacaagtactccaattctgaagccgctggtgagcccagtgcagcagcaacagctgcagctgctgcagcagccgcagatgttgctgctgctgctgctgctgccactgatgctgtggaaagacagcggaagccatcacgccttggcagcttcaaagagattatacagtttgtcgacaagaaggaggaggaaattaagagaacgatgaaacgaagattaagcgagaaagataaccaagctgcaggatcctcagataaagataaccaagctgcaggatcctcagatgctcatgcagtggcttcagcatagagcatactttccaacttcagtccttcagaaggcaaagcattgaagcacatatacagataacatactgaattaggttctctctcctcaaaacatatatagtatgataatctaactagcttcaaacaaaaaggatttgttgttgcagtaggatgatctacgaaaccattttttatcagggtgattagaatttcgtctcagatatacacggtttctatactaaacaattgtccatggcaattaaattctttttcaagctgtgcatagtgtttctcttttccatttgcatctctaacaaacatatttttgaatgggttttaaatgtccaaaatgccaaacaagatctagagaagttgttggagagcggagagacataaagattaaagaacagtttttcttagtatgttatattaagtataatccatgagaactttcttgccatatatgagcaaaggcatgcatgcatatcgcctgatcaatccatagtagactgctatgatccgacatgaaagtctaagaagcaaatataattcagaagtatatgccaatatgcttgttaaatgttagttttaaaattttcactaataaagtgatcactgttagagattaataacttggttgagatcatatatagttgttccgaaacatcacctcgatcattcctccaaatcttcagccaagcaggcatctagcagttgaatgtatatgtatagtacagaacatgaacaatggaaactgaagttgaacgttcaaattttatacctctcgtatttgcctttttgttgctcttgctacatcctggccgctagcgccggcaccggcgctcctcgaactccattccctgcagcccccgcaggcttcccgttcctccatggctcatggccacagcccacacaggaggcaagttgcagttgccatctccatctcgcacatcacaggagtcgtcggctggcgcaggtcgtcgtcgtctatcttgcactgccactagctagggctcgctcggcaaccccccctggcccctgcaggctgcagctgccatcgccgagtgaccgaccgagcggagcctcgcaccgtagtgggccgtgggcgtcatgtgaattgtgatcgggcgagcgccggcgaataacgccttgggccatcgcccagtggatctatccaccaacaggtaacagtaacaggccaagcccaagtcggcagttcaacagaaaaaacttagcaccagagcaggccgcacacagcggaggaactcgtgggcttttgtcttcagctttgggggggggtcttagtaggcccagcagtttttttttctttaggaaagtagaccgaaggagtccgagaggctggttgggccgtagaaataaaataaggaggccggattgcagggttaatcagcctcacggatgattggccgatgggcagcccagtagctagcgctaggaagtgggccgggagggatgaccgggcccccagttgaggctatgagagtacaaagagtagttataaacaaagcatagattcaacaagaataaagctaaataaattgataactaagttatacgtgatccactgggtatgaaacttttaccatagttcaagcatacaataatgagcccaccataaaaatttcactacaattggatcataggaactgcatatatcaattattcgatttaattacagaaaaatatagatttaaggctacaacaaaaactttatactaagctataccatattatatattcactgtgtagatctactcatcagaagtccaacaaaattgaaattttcattttatgatttttctatgatttattatgatttttcaaagatttagtggaaataaataaaaaaagaaaaagacaaaaccatcatccaaaaccactctagggggttatttgaccggttttgaaagttcagggaatagaatatccggttttatagttcggagggtgaagtagtccacccttgatagtttggggggttatgtagactttttccataaaactttttaagatttttttctcacatcaaatcttgtggtatatgcatgaggcattaaatatagacaaaaataaaaactaattacacagtttacttgtaaatcacgagatgaaacttttaagcctagtcactccatgattggacaatgtttgtcaaacaaaaacaaaagtaccaaaaaaaatttggaactaaacaacacgctagcttccgtctccgtcgcacataccggccatcacattcacacccctaatttttttttaaaattctctaccatatcatgtcaaatctttagatacatatacgaagtattaaatatagataaaaaataattaattatatagtttgtttataatttgcgagacggatcttttgagtctagttagtttatagttagacaataattactaaatataaacgaaagtgttacagtagtgaatgaatcaaaacaaggcctcaaccaccatattcacatgtctcgctcgctctcccctctgacttggctcatcggctgtcagccacgcactcagcccaccctcagctcatcatcgaatgcatgtcgtcttcatgcacatggaactattattaaaattgtccagaccatttaccctaagtctcccctcgatcgttcgacagcacggcgcccttgtccttgcggcttcaagaacctgccgttgaggttgatgtccaccacccgtccattgccgagcctgttgccctaaaaactagacctctacttttaatttggatactcttctactttttggggctcaactttttttcttcaaatccaacagtagcatctaaatttaagcccccaaacctattccagagagaatgacaaaagagactcacttgtcattgtcctttttttcttcctttggatagagacacaattagagcatcgagccggttaccgtaggtgtcatgcacatgcaagggaaaagagagagagagagagagagagagagagagagagagagagagcgcatgcgctaggattaggacacgtgatggaggatgggggctgtcctgttggaccaacaggaatagggtctgagggagaaatatgggtgcccaatcaaatatggggtctggaggggcctgctgaagtaatgtttttagtctgggcactcatatttagctattgggacttgagtaggggccttgctggagttgctcttagggttcgtcttgactagtgtagtgtagttccgccaatacatgcaagcgatgcacaactcttgcatgcactattctctcgcttgattaataagccatagttgaaaattttgattactaatttattgtgaaagtaaaatactattaaatgattgataggtttgatgaataatctcaagcgaacaaaatgaacataccatcctcctagtgcacatcgtgtcgaacaccacctagcttttgtgtctcgccctggatcatccattggtgcagcctttgctgtctagtttctgtggtagcagcaactagcaacgtaccatgctgccctcaacctcaaagaatatttggaccaccgaatcagccttgtgacggtcaagtgtgtcgccgtagtggaacgtgcttgaatatccacagctagtgatgaaaatgaaaataatattttttttattttaggattttttttattttttttctaattttcaggcctaaatgaaaatggtagcgataatcggaaaagcaaaaatgatagcgacaaaaataattggaaacgaaagtgaaaacaattttggcctcttccaaccatttttgaagattgtcgtattgagccggtaattaccgtcggtagttaaccattcaaaggccttgaattctaatttaacgatccgtatataatgcatatactttaggtctagttggtctacatctaagcattctatttatacatgcaagcacataaggaaatattttttggaaagaaactatacgagaagtatttcatcaatataggaacaagaaggcaatcaaccaatcggtattgaaccctagctaactctagccactcaccatgaacacgagcggactatggggtttagcttgtttgagacctaagaaatgtgaactatgatttagcttgtggtcttgtcaattgtgtatttatttattactattgtctcatgagataagtcgagttttatacatcttctcaaatt

SEQ ID NO: 5088 - DNA, 3243 bp, Sorghum bicolor
cctgccgtctgtctgccgaacatctatcttttcccagcaactcagcagcaagcatgctcgacagaagaggcaaatgcactggaagacggcatggaaaatgtggagaccgaggcgagggatggggaaaaaaagggcagccggaggaagcaggtaggtacgggtaagctgactgtccgtccagtccgcagcatggaccatgctgtttgcgagcaaaagaggccagtggaaaaccccaaaaaagcggcgcccaagcttcgaagccggaatccaaagctgtacgagatcctcgtgccgaaagcttgctaaccgtagcgagctggaccggaacaaagcggtttagagtttcagacgctaccgagaattttgtataatcatacggctgagttctgagttctgactgaagcttccatggaaattttgtgtctgaaagtcaagttgcagatgctgctgtgtgctgtagctcagtcctgcgacagcacggctgccacgcgccaccaaaagttgggcaggaaacttcttatggataattaagtaggagggacagataagtaagacaggtacggttcacgagacgttaagataatccaggatccgatccgagctggtgaggttcctgctcacttgctcgatctgatccagcttctctaatctaatcacataggagtaccgaaatatgtcgcgttacaaaatagacagaggatcgcttgctaccactctgtccacccaataacaatacaactctcgttttttttttaatttagaaatttaattaaatttaatatcaatgtttatatcaaataagtataatattaatctagggaatatatatctttatgataattctaattaaaagataaaaatgacaataatattttgaataaactggttcaaagctaagactatatttcctctatttcaaattataagatatttttttagatatataacttttgctatgcactaagatatacactatatatagtaaagtaatgtatttagaaaatttatagtattttataaaatagaatggagagagttttttttacatctgagggaagacaaaatttcaaatagaaatctattctatcaaggacagtgggtgcaacaacgtataatatatgtagtgggtgcaacaacgtttaatatattattgaaaacaccaaaacttattgcttcagtttctccataagtgatgaatacagttaaagttaagaaactacataagggtagtaagatcttttttttttccttttgtttgttaatctgttctaaatttgttagaaaagatataatctttttcaaggaccgagggagtacacagttacgcacctcggtggcatgaagctggaacagagggcaaagatatcaccgtgacagtactgcgagtaccaatcatctggacgctcggatcggatctcccgtggacggccccagcaggtactacgcgctacaataataatatctctctccacatatctctgtgcgtggataacgtacggtacggtaacaacaatcgccgtccgtagccacgcacacgccatgacagtactccagtatgacgcgcagcatccatcaccacacggcgaagcgcagccgcgaacgcggacacgctccctcccgccatcccgcgcggaggagcccaaggaggccgaaacgcgcaggaaggcgcgcgcgcgcgctgcggttcgcccgtccagcccagggccagccaagccaagccaacgccaacgtccccggccaacctgtcccggtcggtgcgtgtccgcctgcccctctcgtcagccagagccaccccacgcgaaccaaccgggggtcggggagggataccaatcgctcgatcacgcacacgtgacccccatccaccagcggcctccgcgtcccgcaggggcaggcaggcaccttccctgaagaagccccagcccggcaggcgccagccgtccccgtcgccacgcctatttattctcccccttgccatcccccgctcccatcccctcgtcgtcctcctcttccacaatccacattccacaccgagaaaagaacaagcagccgccaccggagctcacaatcagaatcatccgccgccgtaccaagagtccatccaccttctacaatctacacacatggcgtcgcaccagcagcagcaggcgggagcggcagcagcggcggcgtccgtggacttcgaggactacctgccggtgatggcggagcgtctaggcgaggacgggctgatgcgggagctggcgagcgggttccgcctgctcatggacccggcgcgggggctcatcacgttcgacagcctccgccgcaacgcgccgctgctggggctgggcggcatgtccgacgccgacctccgcgggatgctcgccgagggcgacttcgacggcgacggcgcgctcagcgagatggagttctgcgtcctcatggtccgcctcagccccgagctcatggacgagcctcgcaggtggctcgacgacgccgtcgaccaggcgtcccgcttcctcttcaccagctgatcgatcgagtcgttcgtcgagtcgagatggataggaaattaattatttgtcgacgtcgtcgtcgtcgtcttcgcttctctctttttttttttttttgaattcttcttcttcttcctgttgccgttgttcatagatggatcgtcaggcagggatgcgctgctgattggtcgatggatttcccatccatgtgtactcatctgctgttccttccttcccatttcacaatggagtctgaaaaactctgaattaattaacatgctgccgcttctgaccatcacattcacacggatcacactgcttctctgatgtctcccttgcttatttatttataatcgagcttagcatcgcgtacagagtacgtacagaggaaattctccgaacctttttttggcaacacggctgtgaatgctgactactcctatgcggtttccagtttctctactcctgcttcacaggaaaacaagaagaaaaagaaaagagaggattactctttttttagcacgacgaattagattgggtcgagatggatattgaatcagaatgatgtactactacgtgtatgatcttgcattcagctacgactccccaagtcattcttgaacagtagcggcagtttcggttgaccttgtggcgtgatgcgcaattgcgcacagccaaaaggaaactgaggcgagcacagaagcacttgtttggtcaaaggctcaatccttagcagccagtatctccagtg

SEQ ID NO: 5089 - DNA, 5616 bp, Sorghum bicolor
ctctggatcagccatccaattaaatcatcatgttggcgtacagttctttgtagatttgtggaagagtgtgatagacgccagcgtgccatgccagaacggaagcttttttgcacgccccttgcctgtccaacgggaaaaggcaggcatgatgagggtgagtgaggcgacggacgtctcctgtctcgcagagcacgtgaaaccatccgcggtaatcacttcgttatcccatgcgggaggttaaaaatcattgttgtttactgtaggtcggtgtactagagagagaaccgttgaaattagccttgccggagtacagtgccggagaacctttaaaatatagttttactgtattatattactccctccgtccccgaaagaatcaattcctaggatccgtgccagtcaattgactaactttatagaaaagagtaacaacatctataatataaaatacacattatatgaaaatatattctatgatgaatctaataatactaatttgatactataaattttagcatttttttctagaaatttagtcaaagtttaaaaagtttgacttaggacaactctagaaattgactctttcgtggacggagggagtagtaaactatacggttttattatagcattatccgcttgaaacagagattctttctatgaagcaccagcatgtcggacaggatgtgggaaaaagtcaacaaggccgtaacactaacatgtttcacaacggtatctgttggcttaagattatctattaaatctgacaattatttagtagtgattttatcttaacaattaggccttgtttagttcacttcaaaaactattttttttaagattctccgtcacatcgaatcttgtgacacatgtatagagcattaaatatggatgaaaacaaaaactaattacacattttgcatgtaaatcacgacatgaagacaatgtttatcaaataaaaacgaaagtgctataatgttaaaatccaaaaaaatagaactaaataagaccttactagtactttcagtccaagcaaacagaccagcatgaaatttattgagagggttctcatgaccatcgacataacccaactatggcaatgacgagatatgagttccaaaactgttgaaaaagtcagcagctgctcgcaaggattccgcaacgggccactgctaagatttaggaaaggccagggctacgaatttcgaaaggcggttgctttattccgcagcttctgccgttgccatcccgatcccgttcgtcgatctccaatcggacggccagcaactgcccgaacccctctcgcctccacctggccctcgcgtcgccggccgccacgaccagctcgttcgcctcacgtccgttctgttctgtcctcctgcagagcctgtccaccaccaccaccgtctccattctccacttcgtggttcgtgcctcccccaaccgtctctcccctccccacctccttcccgcaaggccgcacctcatgccttggcgacgccattggtagcttcgcctgttggtcggagcgcgcaggggaagtgagagggaggagggctaggaggaaggaggaggtcgccggagtagcggcaagatgttcgacagcttgctcaactccaagttctacaacaaatggtaccgaaagatcgccttttctttgtcaggtttcttggttctcggcttgctctggtcacggtcccagtgggattcgttcgttctcgcgtctgctgttcctcgaacgattctactcggtttctttcgtttcttgatatttcttcgctgggtctggatttttttcctgccttttcttttcctttatttctccgggatgggatgctgaatgcggtttccctcccccatgttcgcgacgatttggttgcgtttgtttaacctgagcgagaaaagcggcctctgttcttgttttgtgcttaaccaatctttgatttgtttgtctgttccacgacggatgcagtaagcacgccttcaaatgcatccggacgcggatggctccgatacggcggaagaagcacgccatgatccggttcctgaagaaggacgtcgccgacctcctcgccaatggcctcgacacccacgccttcggaagggtttgtttcttcagccgggcgctctgttgttcaatgttcgcgtatgcatcgctctagagtctagagtcgcgaatgggttttgttctgggaaaaaagcgagtaggggagtcttgtcgaggggtttaattgatgtattttacaggttggtggtcaagctgtgggtaacttggtgtagtgtattctgtttcctggcattaatttctatttggtatgcagatggatggcctgatagttgagctgaaccatgcttcttgctatgatatgatcgaaggattctgtgattacattgggaagcaactgggaagccttcagaagcagaggtaaatataatcagctcaactaacgtttggttttctttcctcatttctgttgtcaactactaacaatcatggtaacattgatgaattaatccaggaacacattgttaatgcgctagggtgttggttatgagccatatggcatatcaccccatgtctgttggggccagttgtggtgcattttgttaagcaatcaggacagtagtttagtagtgctagcattcataatacttctgcttgtatgtttggtgttagtaaaagtattccccgtagttcagttggtgaattccaagtttccaactaccctttagtagtatgcgaagagtgcaaacagaaaagtgctgtcttgatgctcaaactattaacacatttgttttgcgttttttctttccaaacagggaatgccccccagaattcagggaagctgtatcaaccctcatatttgctgctgctcggtatcctgatttacctgaactttgtgacctaaggcacatattcacagagagatatggaaattttgttgagcattttgttaaccgggaggtacacaagatgatgctaatttatttttatcaaattgttttgcttttgtggtcctctgcattacatattcacagtattataattcaatccttctgtctgcagttcatttggaaacttgacagtacagagttcactaatgaggaaaggttccaagtcatgcaaagtgttgctgaagaattatccgttagttttgatgccaaggaattgcaactcaagttatgggccacaccggaaacagaacatgtaagtgctacacaaatttattacctgttttctcaaaaaaaaaaaaaaactgaactatgatgtaggcacaaaaatgtgtccttgaaatcatgtgatgtgttttccactcttccttaggatatggttgagaagggttcaaggaagccagcagaattatcaatgcctttatccaacaagcagagatgcgtcaaggatgctccatatgaagaacaagaggatatccttgagaagagttcgaggaagccagcagaactagcaatgcctttattcgacaagacaaagtgtgaaggggatgctccatgtgaaagaaaaaataaggatatgcttgagaattactcaatcaagcccgtagaactagcaactgcttcatccaacaagcagaaggttactgaggatgttccatgtaaaagaaactgtgatgctgaacctgcataccatactgagaaagtggagatacagttgatccaaaaagatattcaagctgttgctgatgcacaccatacaatcgatgagcattcaaggaagcagcaacctgatgtgtctgatgagaaggaagatttgcagaaaccagtgtctcctgtggacactaacagaaggaacacccaaaaagatgttcagaagcttaacagaagagctgtccgccctttggaaaaggagctgatggaagcagtggagcttgatctcaatggcctacctaagaatggatttggtgcagtcaaatttcctgaaacagatggcaacaaatcagttcaactaaatgtcaagccaaacgaggctgtgagagattaccatattgaaaaagagaataacaaagtccttcatgcacgcatgcctggtggtcctgaacacaatggtagacatgcagattcagggctaagagttcagcgcccagacaatcaaggacgtccagtcagtcctcttagtggtaacactagaaataaggctccttacactaagcggaatgttgcaaacatgaagaatcctactgaaaaacaagcaaacagtggtttcttgcatgataaaccgcagcatttagctgatctgggatatccagtgcagaaaggacaaggagtgccagagagggcaggtactatgctgcctccttatgttaaaccaaaatctaacatgcaacctgtgaatgatgatcctgaaaagaaaactccaagtggttacagcaagcccaacatccctggacaaactgaccacttggagaacaaagatgtgcttcgacctgtttctgttagaaggagaactgcaaagctgccagcacctgttgatacttatgttgaggtgcctaacaatgagaaggtcacaagccaaacacccaaaagtcacagaaaccactcaagcaggcagaatggtgctaaatatgaccagaaccggaaatgcaatgggactgatgatgttggtagagggacgaatgctcagataactccaggtagccaatcaaagcacataggcaggaggaatggaactttgaaccacatcaatgactacggcaggttgatgcagcgtaggcaacctgaagcagatgagactgctattgatttcggtaatctcttgcctcaaaatgcaaatggacagaggagacacaacagcggacacaatggagaccttgatgaggaggacaggatgatggacaagcttttgatgcactatagcaagaagaaaggttcggacccaaccaacaatgaaggacatatagatgctgtgcagaaggtttcgttgcatcccccaggtagagctatctcgctaccgcctgaatctgttggcccaggtgaagatgcgaaggttcctgctcggtccacctcacttcagccagatggtcctaagagtgcgcatgtgcacccaaaaatgccagactttgatgagttggctgctcgggtcaaggctctgaggaaggcggcataagatcgtctttggcttgtgtacacgttctttcagctgaagagttgatcctttgttgacggttccttgcaagacacaaccactgagtcgttctttgatgtgcagttccttcaagagattaaacagatttgtgtatgtgttttactctcttttttccgttacattttttttacagtgctcttgttataggttttccatcgaaccaggtgtttgtgtagaataggagcactggtttcaggttaacacgatatatagtacagttgataggaattttccattgcttattctttatttgattggatatattgtacctccaaattgcattgccagatgtactaaattcaccagttcatgatgggatgtgtgtaaatgatgataaattctcaaggatactttctcttcaactacttatgagcgctgtatgtttgtgcatactacatacgtctggaattctgatttttacagcggcgccgtctgcaagggagtttacttttacattcgta

SEQ ID NO: 5090 - DNA, 5794 bp, Sorghum bicolor
tatctagagctccgaataaggccttgtataggtccttcaaaaactaaaaacttttcaagattttccgtcacatcaaatcttacgacacatacataaaacattaaatatagataaaaaataattaattatatagtttacctgtaatttgcgatatgaactttttgagcctagttagttcataattagacaataattaccatatatacaaacgaaagtgttacagaaaattttttcgtatgaaaactaaacgaggcctaatttttctccttgtcgaaccaaaacttgtgtgttttccgtatgcactgggcacgactttccacgcccgtgctcgtgcacatagtgacatgtatactgcctgcccttcctataaataccctgttcagcaacgccacttgtgcaccaaggtccaagaacactacgcacccggcggctacctcttctctctagtctagagccaaaaaaaaaaaaaggaagagctgttagttattagttgctttcggccatggcgaaggctgccgccgccgctctgctcgtcgccgccctgctcggctgccttgtctcggcgtcgctcgccgaccagggcaccgccacctactacaccgtctacactcgtgcgtcgctcgctctagccgcgcgccggccatatcatcacatcatgaacatatatatatacatatatttctgcatgcacatgcatggcgtccacagtttctgaacctgatcgaggtctgtgcgtgcgttctgcagcgtcggcgtgctacgggtaccaggacgagggcacgatgatcgcggcggcgagcgacgggctgtgggacaacggcgcggcgtgcgggcggatgtaccaggtgtcctgcgccggcggcaccaacgccaccccgaacccctgcaaaggcggcagcgtcaccgtcaagatcgtcgaccgctgcccgtcgccgggatgccaggccacgctcgacctctcccaggaggccttcaacaccatcggcaacctcgacgccggcaagatcctcatcaactacaaccagtacgcacgcacgcgccacgcttcagcatctttaatttccgatccccccctagtgttgtttttttattagtttctttttgaagacatatcaataaataatactattaattcgtgttgttttgcagggtgtaataagaagagcaggcgaagcacagaaaggatctaggagctacagaatacagttgggtaatatatagtaataataagcacgtgaaacttgcattggagcaaatacgtcgtgcctatagctaaaataaaaccatggtgtatacctttaatgatttgaatggatgcagctctcctgctgcttgtgtgttcgaaaaaggaaaaaaagaataatgcagagtaataatattagataccgaatgaataaatttgggtgtatgtatacacagtctggttcaaacattgctatatatctttactggccttcttgtactccaactcttccaaattataagtgccatacgacaactagcaggtgtgcgccgcgctggagaagtacagtacaggtggcgctgccccgcccccaacgcgacgtgagacacaccgtgctctgcttctgcggcatccggccgggccattggcaggggagggcacgcgggcatcaataatgtgcccaatgcaatttatttccgattaccgatcaccaccgttcgttccccccaaaaaaaaaaatctccgactaaaaaaattacgagaacaaatactggtggttcaggacgagagagtagacaaacacgcgcgctctccacagttaccggccgaacgggaagaccgacaacaagagtgtgttgtgttgtgttcatcacgcatgccgcagctaatattaagtgagaaacagtctctcgtacgtagcctgttcaaacggcccagcaccacgatttaaggtctgctcttgcatgctgcatccggatcgcgtcccctcctccgctctccggtctccatatatagcgcatgcacctctctgctgagagtagtagacgatctcgatctctctcagacagacagtatctatcgtcatggcgagtagtgctgctgcgccatggtcgttaacgttgttcttcctcccgctgtgtttcctcctcgtcgtctccgtggcgctcggcgcccatgatgtcaacaagcccgggggccactacaacctcagcagggagaccttccctcccggcttcgtcttcgggacggcgtcgtcggcgtaccaggtggagggcaacacgcgaaagttcggacgaggcccctccatctgggacactttcctcaagtatccaggtgagatagatcatcatcgactatatatatatatatatatatatcatcacggcattttatatttcatatctctggtacgtgcttctctgatcgatggatgtgtgtgcttgatgagcggcatgcaggcactactcctgataacgcgacagcggatgtgtcggtcgacgagtacgatcgctacatggttcgtgaatgtctgaatgatttatttgtgtgttgattgctgctgatttgtgatccattgatcagtaatttttgttttttttttcttctggtggtgcaattatattgcaggatgatgtggacaatatggtccgggttggattcgacgcgtaccgcttctcgatctcatggtcgcgcattttccccagtatgtgttgcattgatcggtgaactccatgattcatatatagctaggggggctttgtttcacagcactaagatgcatggttgtgtctttcttttttctggggaaattaaatgcaggtggaattgggagggtcaacaaggacggcgtggactattaccacaggctcatcgactacatgttggctaaccgtacgggatgctaattaattactttttctattttaaattataagttggtttgacttttcccccctagatttataatatttaccatttattatttatgtatacattatatctatatatagaaaaaaactatatatatataacaaaattagaacgtcttataatttagaatggacaaagtaacattgatcttattctcctttcttcgagagtccaattcctgcagcaatttctttatttcctacacatttcaggtttgcgggcactcatgccactcgatcacgagtctttttgcttgtttaacagatattactccctatgttgttctctaccactacgaccttcctcaggtgctgcaagaccagtacaatggctggttaagccccagaattgtgtaagtcttcatgatacatacgcaccatctttttctggcaataattacaagtacaaagatatataaactcagggtattgttttactaaaaatgctatatatacaagattgtttcatagagagaatcccattttacatccttcaaacccatatatatgttgacctgattttttttctctgattatggctatcatatattttcgcaggcctgatttcacagcattcgcagatttttgctttaagacatacggcgatcgggtgaagttttggttcaccatcaacgagccccagatggtggctagccatggctacggagacgccttcttcccccctggcagatgcactggttgctacttcggcggcaattccgccaccgagccgtacatcgccggccatcaccttcttctttcgcatgctgctgctgtcaagctataccgcgagaagtacaaggccagtgaccacccaatatgcatgcagttcctctcattcattctagctgttatagactacatgatgatgcattgtttcacagttttgtcctcgatcgtttgcatacaccatatgcatgctcatactgaaacttcgattgtttcaggttcatcagggtggaaagattggcatcctgcttgacttcgtctggtatgagccgctcaccaagtcgatcgaggacgagttcgcggcgcaccgggctaggatgttcacccttggctggtgataaaaccttacacaaccatcaaaaaaaaaacatgcattagtgctgtgatgtctaggttgaaaaccaaacatgaatcgatccatctgtttcaactatgttctacaggttcctgcacccaatcacctacggccattacccggagacgatggagaagatagtgatgggaaggctgcccaatttcaccttcgagcagtctgcaatggtgaaaggttcagcagattacatcgccatcaaccactacacgacgtattacgccagcaacttcgtcaacgagacacatacgagctatctcaacgactggcatgccaaaatttcatgtacgtacggttattcatttcaacatatgcgctactactgaatgtctgaatagagataaaacgtaaatctttttttttttttatatatatatatctttatatctctctatcgctatatatcgatatatatttatatataaagagagagatagagagatatatatatatatatatatatatatatatatatatatatatatatatatatatatatatatatatatatatatatatatatatatatatatatatatatatatatatatatatgcaatgactttctgatatatgtaaaaacctatgcagggatactcggactggctctacgttgttccatgggggctctataaggctctcatttggacaaaggagaagttcaacaaccctgtcatgctcatcggcgaaaacggtatgtagatcgccaagtcccagcatctatctctcttcatcaattgtcagagaggacgaacagaaacattattgtacgtcatatgtatatatatatatatatatattctcaggaattgaccagtcgggaaatgaaactttgccgcacgccctgtatgacaagttcaggatagactacttccagaagtaccttcaggagctccaatatgccatacgcgatggtgcaaatgtcttcgggtactttgtgtggtctctgctagacaactttgagtggcggctcggctacacctccagatttggaattgtacatgtggaccgaagcacgttcgttcggtaccccaaggactcagctcgatggttccggaaggtgatcaagaacgaggactaaattaaggaactgtacgtacgtgtcgtggtggcttgtttaattagtcgcgttttaatttaatttggggccatgtttggttggtccttgtgaataaacgtcaagtagtttattaggacttcgaataaattaaagaaggttcttttcttctccctttttttatatgtgattgtttattagtactgagtcgtatcctagctaattaatgatttccactcttctctcacctattgtcttcctatccccatttcatgctttttggttcttttgtgaagatttttttcgtttgcatgagaaacatttctttctctctcctcctttaactcaaaggccacatcatcatttgtcttactatacttgcactctgactcatgatatgaaaatcatcttatgatgtgtttggtttaagaatgagatgagatgggatgtctcattctagtttttttatgttgggatggtctaatttggtgtttggttgaaagggatggagtcgtcatcgtagttttgtatttggttggaggagggacaatgatgaagatgataaatcaccgtttgagatccattaggcatccgttaagtgggatccatctatcatcctctcttagtttcttcttccttattcatattatcgtctagtcttcaaccgcatatgctctttccctcctctagttgccccaaccccaacactagcccacatcactccgccagcagccccttcccatggg

SEQ ID NO: 5091 - DNA, 4213 bp, Sorghum bicolor
cctctgcctctgtctgcccaagcgcggcgtggatgcatacatggctcatggctgcatcacctgtgcagatcacgacgccgatgaaaaggattaacggcaggtagcctgtcggcctttggaggggagcgctagctgctgtgacagatagttgctaacattatttggctcctcctcctcttgctgctggctggtcctcctcatttgggatctctgcctgcgtttgattccatctcagagcggtagcatcagagtctgcgatttggcgactctgcacatgctcatttccatgtgtgcctgcaatttctgttttttctttcagaatatacaggttagctctgagatgcatgcaaatctttgccatgtgcaataggatttcaaaacagtgccaaagaaatttaaacatgattcgtttctaacttttatgagcagctggtcggctcggtctgatgtctatgacaacttactttcaaaaaaaaatgtctatgacaacagacagcaacaaccatctgatcgctgtcaggcttatccgcgtatatgagcggatgctgctggttttgctttcgcgtggtacgtggacggtcatggcgctgcaaagttcctttctaactttcgtagtaagatatttacttttcgtatatcatatatgcttttaactcaacaaacggataatttagggatcaatacgaggaaggaagagcaacagtgatgtcacactggtgagggatggctaagcctacatgctactctaaccaatgaggtatactagtgtttagtcgtgactcgacctaaatagaacttttgcttttccaaatgaaaaagaaaatgaacgtcaagggtttaagatgctatctaagtgcttatccttttcagggaacagggactgtgatttcagaatcccttcttttgcggggaggctaggaaaccctaagaagtgaatgcatattggacttggaatagatagcaagcaccatatataggcctatcattggtcccggcattaaatctttagttgttgacaaaggaatcctggaaagccaagtgatgggcggcataaccttatcctatgttgtactcctactgtcctatttgtgtaccacacatagcagaaaatcgtgttaagctctaataacattcatgtggcaaggctacctgacatacaggcagggaaagattgatcaagggatccaggaactcaaaaaaaaaaaaaagtcaaacccgactaacgtttagaatattatgcacatcaggagtttcataggtactggctactgcatcaaatcatgaacggatcaacagcctggtttgtagcaagtcaactgagcaactcaagtatgatttagatcagaaagaggtattagtttagtacctgtgtcggtgggatgaacgaattaacaagatcttggttttgagatccagccgtccaagaatactgggaaggcagggacagtgacggaacatgcagagggcggcagtagagcagcaacctgtccaggttaaaaaaacacacagagacacaaagtaagggatttgcaacgcacatggaagcttaaacggcaatttacttttctgaggctgtgggcagatcccagagttgggattgtaacaaggatggacagcctaggataactcatggctgtgggcccctggtatcttcagatctccactgcaaactacaagcatgtgaagatatgtatggcctagcttatctatcagatggagagagagagagagagagagagagagagagagagagagagagagaggttgcccaagtccaaaaatcctgatatctttaatcccggcaaaacctgcgtggcatatctgcttcacatgtttttaggttggcttgttgtttcattaaaccaaccagatttggctctccaattggctgctggctgcacttccctgatctttcctcgagttcgataaacaaatagcgacgcagcatacctcctgctaactaaacgatctccagcttctcatccttttgcactgcggcccttatatcctgcttacccttcagcttcacacagcctgtcagccattgcattactagctttttttcacttttggttggcatctcttgtttctagtacaaaaggatgctgtttgcttcataagcacaaggtgagatagagcgtggaagctgcccacgaagtgaactctcctgcagttaggctctgaaatgagtaatgggtgctgaggatagagttgagcaagtcacctcccattctgtgtccctgctaacatatggtgattgccactggctatgatctgtaaccaaagaagaggaaaaatgcgagataagcagctggaccatgagaaccagggatacaggtgagtaaatcttcagtttctctttgttttgattcttggttcagtgttagctcggtacgcatcattcactttgtaagcatagtgcaattgactcaagctacagttataatttttatggcaaatcactcctgctcttagtgatgcgtactacacaaggtactgatctttcaaactgtctgtttcaggtatggctattgatttgcttcatattcacagaatcctctccaccctgttggagataaagggaataatcatcgcgagatatataaaaggtaaagataatatccagaaaataaccaaattattgctgaaagctggtgagcaaaagcttttatgcaccttggaagagccaatggacgagcactgcatacaagacagcaaggactcaattcggagaacaatcatggagcatgataaggtcttcagacagcaggtatgtagtatgtagccacatactctagttatccatatatcataaggattcaccaaatatatagaacataagaaagcaaggagatcaggcaccctaataggtcttgactcctgagccatttgatttgctgaggtatatttgaacacatagacacatactgctccagttttgtaatatattgtagtgcatactaatgcttatgttgcattaaaccttcatctttctcgtgataagttgacaaccagttgttagtcagacctaagttgtcttgtcactcatgcaacaagaacttttgtatctgatactgcttctttgcatcaggtgcatgagctgcatcgtttgtatcatgtacaaagatcattgatggctgaaagcgataaccatagttatcaaccgagaacagaagaaactcatgaaatggtgcagggatcaaggtcgaatctcaagagtagtccttctacctcagggacaaatcaatctgctcgccttggtaatgcacaacactcaactccccagcaagtaactgaagatttgagtcttcatgaatgcaagccagtaaactgcctcagcctctttagtgaagaaaactcaacagtcaaagaaagatttcacagggagaaccataaatcagcagaagatgaaagttggaatgcctctgtagggagtgatcttgacctcaaactaagcattggccccagttcacattcaccaaaaagaccgcactggctattctcaggaagcagggaaagaaacccttctggtcagcatcgatgagagcaagctagtaaacatctgatcatttagtttgatggcgcgagaagcaaaacacagcacaccatagtttcatatgctgagaaagctgaagcctccattaaaaatggcatgtggatttgtggaaacacaggcctgaagaaaaatgcacttctagctcggcgcctcagccaaaagaaaaagaaaaaaaacaaggcccagaaatgcttccatcagatttcgatcagaattctttagtcactagtgatctgtatgccaaaaacgtagagtctcacaggtaccaatacttgctgtggctaggacagtaggactgcactaatgtaatgccaagcaaaggattggtgacaattcagttctgggttgtcttgtgcataattttgagtttcagaacaaaagcgataaaaaacattaggtaagtattgaatttgaaagaaccaaacgaaaattccctttcagttctcctacagcaataataatattacagttacattcaataatatacttagtagttttgaatgacccaccgtgattgatgctttactatttgcatttgtattgtgtgaactccatggttttaagtatcatttttcaaaatcaacatgtcctcattacccatgcattgctatctagatctgccctgcatagctcttcattgcaaacaaagattgccat

SEQ ID NO: 5092 - DNA, 3812 bp, Sorghum bicolor
tgaaaccgactcgggtgctcaaaagaagctgaatcttgtgctgagtagctcttgttcaccctaggcttgcaaaatcttaagttggatgtagtgctaatcagtgctatcttgttgcttaccattttgcctagtgttgtgcctttgcgtgaaattttaattaggccaattacctccggccatctagcgacaataaatccttataggtgatatcagagccaagcctccaactaaatccttacagtaaactatggctagcaacaatgtcagcaagcccccacactttgatggcaatagaaggatgtgtgcacatctaatctaaaggctatggggaggaagatttgggagggggattactaagggatactttgtattgcttgacttgaaagctccaatcccaagtgaggaacaaaagttccaactgaatgatcaagcactcaattgcatatatgagacacttgatcccaaggtttggaagatgttagaggaagcatatgacggtacctccaccataaaggatgctaggttgtacctctttaaggacaaacatgctaagttcaagatgtttgaaggtggaaacgagccagctagagatgtgttccaccgccttaatgtcatagtcaatgagttaagggcacttggcacaaggtatggatgatgaggatttctcacataagttcttgcggtgcctcccttccaagttcaagaaccatcgtcaccatggtattgagaaatggagtaaaggacttcattcccacataagccttgggagaaccattgtcaccgtgatatcgagagaggggctaaaggacttcactcccacgcaagcgttgggagagatcatgactcatgacaccttttgaccaagaggagagtgatcagcaagaggagaagtaaaagaagaagagcatagcattcaagacaaaatcatcaagatcaagaagaagattgaggagtgatgatgatgagagcaacgtgttcttcttttaatgtcacgtgttctcctatcctcctctctcttatttcatcttgtaatagtagcaccagctagttagagccgaccctcatctgcagggagtgggagagaaagaggagatgtggaccttacatacaagccccacatgtcggtccatgtgaatacaaagttagcaagtcacattgtcacgttagcagagaatagcacaatacctgtttgggctcgaatgccacctaaacacaagttaagtttaaggatatgaaaatggtaatttattagagcatcttcaaggatttggcaaataacattctatccatattttttttagcaaaataagaaaaaaaaacccttctctaacagtttgacatctcaattcctcatcttttttaacttggcatatctctctgtctagcgcgcaaatatgcgcatggactccgtacttagcatcggtctttcttctcatacttaacagagctcttccttcgcttagcggggctctttgtttacgttagcgggttttggggtttttagaaacaaaatttgtcaagctgttgcagttgtgatcttttttcttcctatattattttgggagttgacaaggaaacaaattttgccaaacggttgaaaatgctcttagttggcaacttagatgacatccgacgttgggaacttagatgacacccgacgccaaagtctaaagacttcaaaataataatttatgagttagagcacaaaaatatataacatgccaaattaagaatctgtcataaattttactacaagtaataatgcttcacgcgtgtgaaaaatcactgaccaggcaaaaaaaacacatggcaacatcaatttgagtaccactcccaatttatgttttcatgccccaagcccgaaggaaatccgaaaacgcaagaaaaagtaccggacggcgccgtgccatgcagccttgttcagacatcagagcaacttgagctagagaacgaaggagcgctcaaaagatctctccccctccagaagctcgaatttcaccatccactccaattcggccaagtggcgtcttggccatctcaagataagccctcctctcctaccaccggcgcctcttcttctcttcctcttcctactccgcaatcaccaatcaggagagaagtgaagctagcattcaacaaaggaagaagcgagcgagctgacaaaatcgactgaccatccatccatggctctggcgccggcgcctctccagtgcttcctcacgggcagcagcagaccggtgtgcacggcgacgccgcccaagcacgcgaggaggccgtcgaggatctcgtgcaaggcgtccggcgacgacaaggacaaggtcccgtcgggagggaatgatcttggggtcaagctcgggaagctggccatggtcgcgctggccgccggcgtgctggcgctcggccccgtcgacggcgccttggcggccaagtccggcggcagggtcggcgggcaggccttccggtccgcgccacgatcgtccggccctcggataaacaactccaggtaatctttagcgccttctagagtgatctgaattgtatgttatctgtcggagctcatggatctttcgccaaagttcagttctacttgtgttcagttcagagctcagattagatgacgtcttcctcccaccgactacgagctctgaatgtctgaaactctgaattattgtgaagatggatatatagcttttgatcgtccttcttgatggtttcagtttgttttcaatcatttgcaagaatctagagtagcacgacacaggcgactgaaatcagttgtgacatgaatccatgcgtgctgcgtctgctgatgcaaaaatgttatcatgcatgtgtggcatgcgcaggacgaacatctacatcaacccgccggtggcgccgcctctgggcggatacggctacgggagcccgttcttcggcggctacggctacgggtggtcgccgttcagcttcttcgcgcccgggccgagcgtcgccgtcggggtcggcggcggcttcgacacgctcgtcctcttcttggtgctgggcgccgtcgtcggagctgtcaggcggtttctcaacaggaacaacgatgattacgacgactactgattatcaaagctagatgatgtagcgaatgtcatccttcaccttcatgtgtaatatatggcgagattttttttttcgtgtggaatcctaggaacagagtgtactgatgcatcaggaagtgtatgtaataattttgttcagtgaaatgtaatgagaataacatctatagttagggacagttgcaaacagccaaatactctaagcatcgatcgagccatcgactacactgtgtgtgtaacaggaacatggagttaaagttggcgtcgacaaagtttaacttccgtcacatcgaatatttggacacatatatggagtactaaatatagattatttataaataacacagctagagagtaatttgcgagacaaatcttttaagcctaattaatccatgattggacactaactgtcaaataagacgaaaatattacagtacctgttaaactttaataccctaaccaaacaccctctaatgcttagggtgaaagtagcactggtaatttcagatccgaaccaaattcaaatttcgaggaaatagagaaaaaatttaatatccatatagatacagataatttaatcccatcatattatgatacaagacaagatacggaatcagcaaaacccgatgaatatggattatccacaaattttatggattatttgatgtttaaaataggaatagaaaatttcactcctcacaaagaactgatatacaaggtttgggt

SEQ ID NO: 5093 - DNA, 5290 bp, Sorghum bicolor
agcagatcaacacattctctttcttgttctcagtaggtgttctattatttatacagttgggtaatcctattttgttggatattgcagtaaataactttcatcttgtgccgttccttgccaagaagtacggtcctggtgcagctaagtatgcccctacatactggggctcatctggcacataacagttcagtggcggcttgcagtaggaaacatgtaatttctttgtgcaacaactatttcaagagtgaaatatgcagttcatcatcactgtgtgtattgtgtgcgtcatatacggtttcagtcctgtgaaatgattttctcgtgtcaagaatgacaggtttaaatcgatgcttaaatatgcagcgaaagcagttttccgttcgatccatatgattaacgttttgctttctgacactaaaaatactttttagtagctgaaacaaacatattctataagggtctgtttggaaaagctgcaacaactctagataaaaaaagcaacttcagatccagttttccaacccaaacactcttagatccacacggatccatggatctgtcttagatccaaggattttcgtgaagcatcttaggggtgcttcgtaaacaaactcagatacccgtagagttaaaaaaaattacccaccactaccactctctttctctttccgtgtcaaatcagcacacagatgagcgcccacgtcctagtgttgtattggtcatgactaagtggctgtgcctaagcctcgccgccgtcatccgaccatggtcacaccgtcctcgcatcgcggcgagagatgagaaggttcatgtattttttattttagaccctagataattatttataattacatataactccatcttagtgttggaggtctccaaataggttagtagaacatcgggtctacgacagagttgctccatggcagatctaggtgttatttagacctggagctctgctgaacaggtcctaaatgtttttaacactgtttgtacaagccatgacaactaagagtatgtttggttggttgtatattaaagttctttgtttttttggctgaatttctcccatgacaactaagagtatgtttggttggttgtatattaaagttctttgtttttttgcctgaacttctctcatgtgatacaggcttcttgtgttttgttgcctgaacttctcttaaggcctggccggccgggtgcagaacccccccttcacccaccccactaccccaagtgtgtagcacctatcgacgtgcatgatttgctttatcaatagtatggaaaaagaaacatgtgatttatatcagcaaagtgtgtagcaccacccatggacgtgcatgtatttggccttcttgcctattgccttggtctcattttcgacggcttctcctcccttggctctctgctgagtgctgacgaggtaagcagtaagcacgcacgctttctttcctcgttcctctaaccatcccccctcgttcccccaaccaccccccgagctattctcccgatgctaatgctaccaagtaccaaccatggaggcagatagatagattatccctttcctctctagcgcttgtaggagcatcaggagcttatgccttcttgcacgctgccgtctgtcaagtgagcaattcgtcgaacaccttatgggcatcggtcaacgccaaatctggggcagttgatccatgaccgtccctgtcgttgttctcacgatgaattcggttgttggtctcagcgattgaaccccgttcttttccttgcacactgaaacccgaaatcgcttcttgctaatcggacagcgcggcggctgtttttctggttagttaccatctaacagccactccatgttatcttatctcatcttacttccgtttcgagcaaaaagccatgtgatgtttcatctaatcttctgtttacgaatttcaaactgttgcagggctgttaattgatcttgcttagaaataataccatacagcagtaaggagaagtcaaatatggcagatgcgctgtttgttgttctcagaaaagttgccctttccctgggagaaggcgcactggtgaagattggcacggatgtggttgaggcagcgccgatcttgacagattttgagcatggcatgagacagatcgagggtgagctcttgatcctgcaggcctttattgggcaggtccgaatgcagaaagccggtgacaaggcatttcacgcatggttggaccaggttagagatgtctcccatgaggtggaagatatcgttgacgagtatgcttaccttactgcgcaagacgtggatacaagcagcttcttcaagagaaagttccatcaggtgaagaactttgcggcatggcagaagttaccagtccggatcagtcaagtggaagctcggattcagaggctatctgaaatgaggaatcgttatgggatttctgtaggtgagcaagacaggagtagcaagttgcagcaatccaatcaactctctgtgtcagattctgcttacttaactgatgactctgaaatagtagggcatgccgaggaaattgggagactgacacaatggttacttgaggagaaacaagaccgaactctaatagccatcttcggtatgggaggtctaggtaaaactaccgttgcaagcagtgtctacaagaaccaaaagatcaggagagattttgattgtcatgcgtgggttactgtatctcagacttaccaagttgaagagcttctgagagaaatcatgaatcagttaacagagcagagatcaagtttggcaagtggcttcatgaccatgaatcgcatgaaattagttgagataatacagagctatttgcgtgacaaaaaatatttcattgtcttagatgatgtatgggagaaagatgcttggtcatttctgaactatgcatttgtcaaaaacaactgcggaagtaaagtgctgataacaacccggagaaaagatgtgtcttctttggcagttcacaatcgtgtaattgaacttaaaactcttaactatgctgaatcatgggaactattctgcaaaaaggcgttttttgcattggagggcaacatatgtcctaagaatctcacatctttggcaaagaaaattgctgataagtgtcaaggattgccattggctattatagccatcggaagtatcctatcataccatgcattagatgaatgggagtgggcatttttctacaaccaacttaattggcagttagctaacaattcagagctaagctggatctctactgtcttgaatctgagcttggatgatctcccaagtcatctgaggagctgctttctatactgcagcctatttcctgaagatcactggattaaaagaaaacagatagccaagttatggattgcggaaggttttgtggaagagagaggggatgggacaacaatggaggaagttgctgagcattaccttgcagagctaactcaccgttctcttcttcaggtcatagaaaggaatgcaaatggaaggccaagaacatttgttatgcatgatcttgtgcgggaagtaacctcaataactgctgaaaaggaaaagtttgcggttatacacggccatgttggtgcaacccaactttcccataatgcccgccgcttgtgcatccaaaacagtgcacattcccaaaactatttaggaaattcacatctccggtcattcattttgtttgacagtctagtaccatcttcctggatatatgatgtctcatcacatttcagactgctgagggtcttaagcttaagatttaccaatattgaacaagtgccatgcatggtcacagaattgtataacttgcgttatctggatatttcgtacacaaaagtcaagcagatacctgcatcattcagaaaactcgtgcaccttcaagttttagatctcagattcagctatgtggaggagttgccattggaaataactatgctaactaatttacgtcatttacatgctgttgtagttcgtgattttcaagaaagatcactgaattgcttcagtgctacaaaaattcctggcaatatttgtggtctaaagaatcttcaatctttacatacggtttcagctaataatgatctggtttcacagctaggaaagttgacccttatgagaagcttgactataatgagtgtgcggcaaagctacattgcagagctatggaactccctgacaaaaatgcctaacctgagtgtcctgattatttttgcgtctgatatggatgagattcttgacttgagaatgctgaggcccttacctaaccttaagttcttctggctggcaggaaagatgatgggaggcatgctcccattgatattcaataagtttgaaaagctaacacggttaaaattggactggtctggtctgaataaggaccctataagctccttctcttacatgttaactctagttgatctgtggctgttcggggcatattatggggaacatttatctttttgtgcaggatggttccccaatctcaaaactcttcatattgctgatatggaacatctgactcaaattaagatagaggatggaacaatgatgggtctacatcatctggaacttgttggtttaaggaatatgagggtagtacctaagggtatcaagtatattagaacactccgtcagatgtttctgactgatatgccaaaggagttggttgaaagcctgcgaggaagtgatagtcacattgttcagcatgttcctaacatccatatttttgactccactgattctgaagcaggtaatctccacattcttaaccaattaataatttaaaaacaaatacagactatgaatcatcaatttaaaatctaagcaagaactagtattaaaaaaagcaactatttgcaaagcttattaatgaattagatccaaacaatttatcccatctcttcccttatctaccaataggtatttgcaatgttcatccttatttttcctattcaaactcttaccgtgtacagtatggttttctaaaggagtccatacatgaagtgtactaatttattgttagaggatgaagttaacatagttagtacttttttgggtatgccacgtcccttccagtttgtagttcaaattatgtttgcgtgtattgaatgaatttttacagatggaatataccttgtggattattattttttcttatggatctgttctcatctttagatttttttagtgtttttcagaattgtaaatacaagttttctgatattgcaatctgcactcatatttagatttataatttgtacagaactgtgactactactttgttg

SEQ ID NO: 5094 - DNA, 3549 bp, Sorghum bicolor
cgcttgaatccttacatgatacttctatgtgccaacaatgcttctggaagacaagttgaaaaaaagaaaccctatctaaactaatctacgcgcacggcaccgtacgcatgcaatttccgtgtgcatggcacgatcgatcgtcgtcgtcagttgcgtgcaggatcctatatgatgacaatactaataataataataacaaaggtgatgagtgccaccggacgaccgtacttatagaaaacaccattggctagctgcagttgaatgaaggggagggaccctcgctctgctccatttggctgcttatcacgggcgttggtctcacttcatcccgtcgatctcttggtcggtcaacggtcaacggtacgacgacgtcatgaaaatgactttatttatttatttatttcttaattcttaatataaggatatgtttgttagagcttcagctccggttaagattattgttctgcctctaacttctctagtagagcaatttctttttagttctgatccgagcacctcttctctagaagaagagagccaattattatttgtaccactaaaaagagtttagcagttccatatgtaaaaagaggatgtgtagcgtactcgactatggatgcaaagttgagtaagagagagaaaaagttctgcatgtgtcacttctctatcggttctgctttcttaattaaatgagcaaggaaggataatttaggcgatattagagcatctctaagggttttgcatttgaggtttgcatttgagtaatttgccaaaaagctccaaaagaggtatccaacggttttgcatttggagtttgcaatttgggcaacttggcaaatgagggagcaaacttggtaaaaatgtcaagttgtggatggctttgcaaacccaatcgcgcgagcaaagtcacgcgcaaggaaagcccgcgcgcctggagaccttctatttttatcatttgccaagtccaaatgtcaattcctttggagatgacctatttttatcctttgcattttgttatgggagtttgcaaataacaaccaatgccaagtcaatttgccaaagcctttggagatgctccgttgcttgccctgcagtgctcttattttccatttcttgccctgcagtgctcttattttccatttcttgaaaaaaaattttgggcaatcactgcggacgggtgcgtttgatgctaagtttttttaaggcaaactttattatttcacgaagactgttacattgtttaaaaaaaattgtaaggtagatgaaggggatcatctacccaaacctgagaactcttttgtgataaagcgtttgatgcttactctagctagtttgcaagtatttgatgtttttatgaaagcactcgatctccaatgtaagataatacatatatatgatctttataaccttctaaactaaatactttgaaagttattttataatcaacgtttaaaactcgaattaaatcttgtccaaaatattgagtactacttgcaaaccggagaaggtagcagtactgtaggataaatcgttgtccctctacgagaattcgaaatacaatatacagtatatagtactagatgtacgcgcttgtattatatagaacaaacgttgcctaattaaaagatatccactaacaaatgaaattccacgacgtgcaaggacatccattcacctggtagttttccaagcagattttgttcacagtggaaacagagccgggaaagttctctacaggatgacatgcactactctttaagaaagtaactaatctagccattttttttcaagcagattgtgttcacaatggaaacagagccaggaaagttgacatgactactctttaagaaactaattaatcaattaattcctcgattatatataataactgaatttaaattatatcaccgtaccatggccatttcactcctagtggcctagtagtatataaaagatcgtctctctcccttggctgccgagcctcctaatcatacgaacaagagaggagaggagaccacgtcgtcctccgctaattctccgcgcagtggttgcccgccaccaactccaacaagacagcagcgatcgagctcaccacaaagcagcagcgcagccatggcgcccaccatccctgtcccatgcccaggcgccacggttattacctactctactagctagctaagccctccacgccccctctgcccgccccgccgttgtccgttgaaccggccggcgatcaagaacagctgttatatatacatataggtgcaccagcgttgttgcgcctgcacttcgtccggcgacgtacgtacgagtacgacgatcggcgatgatggtgatgggctacttccggtcgacgaacaagtccgcgacgtcggcagcgggcggcaagaacaagaagaaggcgaagaacagctgtgcgccggcggcgcgcgaggaggcggccggactgcgggaggcgctgctggaccagccggcggcggcggaggaggacggcggcgttcctaagggctacttcgcggtgtacgccggggaggagtcccgccggttcgtcgtgcccacggggtacctccgggagccggcgttccgggacctcatggagcgcgccgccgacgagttcggcttcgcgcaggccggcggcctgcgcgtgccctgcgccgaggaggacttcgaggacctcctgcgccgtctccagcgcaagaacggcggcgccgtcgggaagggcaagaaataaagccgtcgtcggccggtagatgatcgacaacacctcgctagctaggttccttcttgtttgtaacaatttgcttgttgttgacgtacgtgtagatcagatcagatcagttcatcagttgaggtgaggatgcagttcttgtacagaatgcaagcaaccaagcagccacatgcatgcatgcatggtagcgtagctctgaatgcatggcgtgttgattcactgttgcttccgtgaaccgtggagaaagagtatacagacttacagagaactcctggggaaattcagctatttattatttcatatgtctgaaacttgtgagattcgattcaaatttcgacgttccaaacagtccgtacgagatatgcatgatgggatcgaggagaagtatgtagaaagaagacagggctttatttcttcagttcatgttgtatttttgtgattagaggagcagtcctcttcagagttcagaggatgaacccttgtcttgtcatgctgttcctattcttacagaaaccgagaaaaagattgcctttttttttggatttgtactatttttcatcttatttacaaacttgatctatttggttggttggagatatatgtgatgatgggggtggtgtagtgtgtctctctatattcacactcatcaattcttagtgatggactcttaccactgttccatacttgcgctaaaacatggacccttcattttggacatcactagttaatgcagattgttgcttacagaaacgaatactgatcgatcgatataaatcaaacggatctggatctgaatgtcagttacttcattctgaaataca

SEQ ID NO: 5095 - DNA, 11616 bp, Sorghum bicolor
gaccggcggatgggcgaggtgggctcggagatgggcctggagcgcgtggcccgcctcgcctacgactgcctcagccagaaccccaaggtccggccgtccatggccagggtcgtcaccacgctcgaggccgtcctcgccgccgccgacgacgccccgccgcggtgagaccggcaggtcggccggccggcgagatcgtgccataggtagtagggacggcatacgacttaattaggtgtacgggtatatatgcgtgacatgttttggtgtaatcatttgattgtatcgatatattcatggagtataaaattattaataaatttgaaaagaataaaaaacaattgagcagcttttctcggacgctattgtacagcaccactgatcgacgataccctcactttcctcatgatgcatttggggagaataaacagcttcctgacaaggcctgggcatattcggcttggttctacggttgcgacacaagttggttcccagaaaacagcgattggtcgttttttttttaaaagtgagaactcgggaaatttggttttggttcggttctgattgtaaccaaattaactgagtctatctcaacacatgttcataaaataaaaaaaagcatctacgcctcgtccattcgtgctgctctgaccttgtgctgtggcgctgttgcggggaaggtcggaaggggagagaaggtggctggaggaggggaagagttggagcggcggctggggagaggagataggagggggggggggggggggggggcttgtctagggttgtcaatgaggagggacatgtataatttcaattggtattgggctgagccgtaatgtctctcgcttgggacttcttatgtttactcggttcttcggttattttagttaactgagcccaggaaccaaattttgattggttagtttgccgcctgagagggagagggagtgtgtgtgagagagaggactgctaggacgttgaggtcaccgagaagggaggggtcgaagttagggcaccagaaggagagtcgaaggggtgcatctgaggtgctgggagaatgactgctggtgagggaggaagggagattagggttttgtttacatagtgtgactagttaccgggccgagtagacttagccatattactcaattaatatattttagattaaccgtcttggttaataaaaattgatcatctcagttaattcgagacattaatcgagactttttttaaaattagttcctgtttggcctgctaatttttagcaggtttgatatccaaacatgtggagccatcctgagcatgcatgtacactgcaggaaccgatgccgatgccggccggccgctccggccttgcgaataaaatatggaaaagctggaactctgttctcctaattcgatatataggttgatgaagaactttgacttaaacatgccggcagcgttcggctgcactcactttggctgtgccagttccagtgagtttacatatggccttgtttagttcacctaaaaataaaaaagttttcaagccgtcacatcgaatcttacgctaagtattaaatatagataaaaacaaaaactaattatatagtttgtctgtaaatcgcgagacgaatcttttgatcctagttaatctatgatggaacaatatttgatataaacaaacgaaagtgctacagtatcgaaatccaaaatttttttacatctaaacaagaccatagtacgtgtgtcctaaattgtttcagacatactatattatattatactatactacgctggggagggtcggcaggtcagaaggccccctcacttactcctacatatagcaaggtcgtctgctactacctgcaggccggcaagctagcacttgagctgctgctgcttcttcttcttctgtgtcttcttgtttgctgacagcaaaagagatcatgtggaggctgaaggtgagtgaaggtggcgggccgtggctgtgatcggagaacggcttcctcggcaggcaggtgtgggagttcgacgccgacgctggcacgccggaggagcgcgccgaggtcgagaggctgcgtcaggacttcacccgccaccgcttccagaagaaagagtcccaggacctcctcctgcgcatgcaggtattaagaactcgtcacttcatcgtttcagatgtactacatccatcctaaacaaagaatgtaatcctcactttccagtctgtcaaacaatttcaactttaataatcttgaaaataatcctcactttccactctcctcaattgtatgattttagaactagttttcattcaaaaaaactgcgtgaacatttgcctatttttgtcgtataataaaaattacaacaaagcttttgctgtgttttttctaaaaataataataatctgtttacaaaaaattacaaacatctttatatatcaaataattatcattaaccaatggtaaaatatatttttataggaaacttattagaagacataaatgttgatagtcaaattacaaacattattgttttccgagatgacatgcatgttttcgacgtgagatatatacggatatacgtgcggaatttattggttttttctttgtgtaaatttatttactgaatgcccccacgaacataacgtttttattttttaataacatttttttatgaaataagaagtatattaaattatagttgagtacatcatcatgttacaagcactctaaaatacaatatgtatacctagaactgttctccacctacattgtatctacgcttttatagctctaaatctaaatgccaaacctacatggtaattaaccgcacagacaaatactaggtaaaaggtctgagaatagatgttcaatgaacaacaaccaacacttctgcagacggagttaaataaacttctttcatatgtcttccttcttccttttgccaccaaagaataagaaaaaatgatttgaatcttcacaaatcaataccagtaattggcttgagggctagtcttcttctcaatagtcctttatcgtggtcaatctaaccattataaagcgaagaagaaatagcagaaaattattccatgacgacaacatgatctccatctcagaatcaccatttggaaacctaagtctctgtgtcgtcatgccgagaatattactgacgcagtagttgtcgtacgcgctcatcttcatcaaacttgacatagagaaacaaaatccaccctatcccctagtcattgttggggaagaggagaatcaagtctatactaagaaacttggcataaagagatcctaacgctaaatgactcgtacatccatcagcatcatataaggaatctaccacgggccagcctgttcgctggtttgaaaagtcatggctgaaattacggagaaaaacactgctggctgacagaaaaagtacggttgataagagaagcgaacagagttggcctcaaagcttactcaagatattgattatactataggtaccagagaagtatttgaatttcatggtaaacacgatttatccgcagctattttttggttcttgacactataatgtgaacaatattcttaacaagataactagtactaaaagtgtgttcaggtttgccaaggcctccatccagaaattgtaagtgtagtatttgtccagagaaaaagtatgtttttttaatatataaaatttaaatgaacatatttatattcaaagtgcctcttagattatttgtttttttagcaatcaattatatattataagggaaattaagtgttaaaatataaattatatacgagttaatttttctctagttaaatacgtttatgattcctggctggagagagtacatatcagcgatcaagttttaagttggacagaatgtgttcccaacgtcatcaagtagaaaaagaaaatgtcaaagcaaccaacttgcagtttttttatccctagaaaaaagttccctagataaatatttacatgatattattacccgtacaattcccacccaatacctcacccacttatacattcctagttccctgaataaatatacttttttttaggaaaccctgaatatacattatattaattaccattattttgggctcgggtctaggactagtccatgcttgggcctgcacatacaggtcagacttgatccaggcccagcttacaggtctgtttgacagttgtttgctgataagtcgatttccccgtttttcatcatccattgtaaatccttatcagagtatcatattttgcatgcagtatgcaaaacaaaaccaccttgtagaaaatattcctgccgtgaagcttgaaaagggtgcagaggttacagaggagattctattaacttcattgaagcgagctatgaatcagtattctgctctacaagcacatgatgggcattggcctggtgattacagtggaattctgttcattatgccaatatttgtaagcgtttccaacttcgcagatcatcatgccaccggaacatctgttgctagaagttactactttcccaacttttaataacatctgttcctctttcagatatttgctctgcatgttactgggtccattaatgtcgtgttatcgttagagcatcgacgagagatactacgctacatttacaaccatcaggcatgaaatactttcatacattcttattcaaaagcaagaaaatttcgattttggttgtcgatgtaaaaataataagaagattctatatggaacaatgtaatacttgcagaatgaagatggaggttggggcacacaagtgttggggccaagtagcatgtttggatcatgcttgaactatgctacattgaggcttcttggcgaggcgccaaatggcgagaatgatgcgttggccaaagggcgtgcttggattttaacccacggaagtgcaactgcgataccacaatggggaaagatatggctctctgtaaggaaaagtagacagaaaatgttacttcaatgaagaaatataaaatattattagtgaacatatgcacaaacttaatctcctctcttgccctaatctaaatggcccatgtaagaggtgggaatcacattaacttgtctaccttttgatggagctagttctaattgggcctaagtcagcccaagaggcctcccctatgtaattgtgcttattcaccaatactgtggtgttcctgatattttcccttctttaatatctaacagagaaattttgtgataactttgaaatcaactatgacaattgacacagaaaataatcctaagcttgtacttttattaaaattcagttaaaattgtcgtctatgttgagactaatgtatagtatcttttcaatcacagataattggtgcttatgaatggtcaggaaataatccaataattcctgaattgtggatggttccatattttcttccaatccatccaggtaactgtaccatttagacaagaggactttagacaaacagcttaaaaattttaaattggatctcagaatacaaaatggttttcactctgaccttgaatattcatttgcgcgatttttgtaacaattccattaccattttcgtagcttgtgattcatttgtaaataggctaaaaggaatctaaaaacagttttataaacagttttaaatgtgcaagttcaacccagcgttattataaaaatacagcaagtaaaacaatgtgagaagcaataatgtttgaggtcactggcttacaaagaacaataaaactgtcaggggcttggccggggggtgatcgacggcgtggtggcggcggtggcacagggcaggggaggcagcgcagggagagggagggggcgacaacgcagggataggagagagagagagagagaggagagagagagagagagagagagagagagagagagagagagagagagaggggaaaagagctttcgtccgtttattacttgattcatatgattacatatcccctagtatttatagcccctatgggacttgactagcaagcaaactaggagatccttctcgaacacggattctcttttctatcttattaactctcaactttctaaaacttaacaaactctttctaaaacgattagactagacatggtaatcatagacggcgtggaaggaaacggcggttgggcgcgcaccccccttagggcaggccgtgaggcccacctagggtggcagccgggacggcggcaccccctccacagaccctggccggcccgttctcgccattgctggtcgcagcctttattgggcacgtgacaaaaacactcataaggaatattacaaacctagtacttgctattcaaaatatgagtaaataaggtcccagctacttcatccaatcatcctctttcacccttttatcaattcacaagctttttagttttctatgcattagcatgatcatctaaactccctgcaagataattgtacctttttttacactttctgattcaaacatactttatccttcataggacgattttggtgtttttgccgtttggtgtatatgcccatggcttacctttatgggaagaaatttgttgggcccatcactgaaactatactggaattaagagaggagctctatagcataccatatgacactattgactggaacaaggctcgtcattcttgtgccaaggtttgttactgtccaaattctaaaattttaggtattcaactctataaccttagctaagatatgcatggggcctcagattactgttgggcgattgttcccttaacccttaactggaactagtaagtggtaactgctgctagttatagttatgtatgcattcatattacagttgctctgattgtgagaataagccatttgttagcagtgctagattttttaaacagtacaggctatagtacaactgaaaactacaattctagaaggcagtaggtacacgtgcacttggtattggttagtacatttgcaattgcccctaaaaataatcactattgtaggacaacaaattttggttgaatctaattcttggacacacaaaataacatgtaaaactgaaggactttttgtgagccccatggaagatcgagtttgcaacctaaaaaatgcattagcacaagttccataaacattattggtttagtactgtcggaactactaatttcatgctgcttttgcagtaaaatcaaaagatccggctaaaataagaaaagcttttgtaatacttgccataaagctttagagagggcaatacttcctcttatcctctactaggcatccagattttaaatgtttaatatgctcttgctttgttacaggacgaccttcgctatcctcgctcagagttgcaaaatattattttcagttgtctcaacaagtttgtggagccaatgttaaattgctggccagttaacaagctgcgagagaaagctttggacaacctcatggagcacatccactatcaagagaaaactaccaaatacatttgtatttgtcctattgataaggtaatgcatatggaagctgcaactctaccttttcaatttataactatcctgcaataatgtttaactcacttcctttgggaacagttcgttgtttacaaactttgtatcttggcactaattgttggcaactaaaatccatggcatgataaaacatgttctttttcttgttaaaatgccagctatgatctttgcatttcagccatgttttctgccaataattggcaactttttttctgtgattaggcactagacatgatttgctgctgggtagaaaaatccaaattcagatgcattcaagaagcatcttccaaggatttatgattacttgtggcttgcagaagatggcatgaaggcacaggtagtggtttcttatgtcccatggaactatcagaactgaatttgtttttaccaaccaatcagtaatggttgtacctagccattaaacttatatgcaaaggacctttccagatgaaatatttataataccgttgaagcacaactggaataggctagggaaacacgtcttactgcaatagaatttgaagaaaactaaatttttttaggcttagcttattattcatggactataataagtataaataaaaagagctattatttccacatgttaggcgcttacatgcctctgatagactggtaccattggaagattgaacttgttttgccttaggatgtttggtagatatcactatgttagagaagttccctcctaaaattttcatccaacccttccctgaatgtgcaaaaaggaatggtcaaagagccagacattttccttgcagcaagaaatagagataatgcataggcagtccttttagtgtgctttagatttctgtgatggcatgccacttttcctcttacatacagaaaaaagttctctttttaacctagaaaaaagttgttgtttttgaaggagaagattccttctaaaggagactgattttttcccagacataaaactggataagaatctaatgttattctgtgaaaaataggtttatgatggctgtcagagctgggagacagcattcatagttcaagccttttgctcaacagatcttgccaatgaatttagtcaaactctagaaagagcatacgattttatcaaaaaatcacaggtaattctcctattaagttaaagtggaacttcttcagaacaaattgaaatgccatttcttttcctttgcttcaaggttcttgaaaatcatataaattacgaaagctattatcgtcataaatcaaagggttcatggacactttcaacagcagacaacggatggtctgtatcagattgtacagcagaagctctcaaggttaacttcagtttataaaagttggattggtattcatagaatgtatgatgaaaagctttatttttgtggattctaaattgcatatagtcatttccttcaggcattactgttgttgtcaaagatttcacccaaacttgttgcccaaccaataaaacaggaaaggttatatgatgccattgacagcatcctttcttttatggtatggccctccaaactaaatcatttaacatgacaatactttgatcaacatttgtccatgctcatgaaaattatacatctatggtgcactatgaaactgtaatgcaaggtttatcagctgaatgaatgtttccttttcttttatgactattgaagaacaaagacggaaccttttcaacatatgaatgtaaaagaacagtctcttggatagaggtaaagtatccctcagtcatacttttaccagttcaactgaaccagagtatataaatattttaaattttgtgtggaaacctagattctcaatccttctgagagctttataaacatcgtcgtggattatccgtaagtgatcccaatgcccacatgaaaactataactgactcaacctcccaatgaaatagagaactaataatggtgtgtaaacaattgttagatctgttgaatgcacatcatcagttctcgaagctttgacattgttcaaagagctatatccaccataccgtgccaaagagatcaaaaaatgtattaaggattgtgctatgtttattgagaacaaacaacgaaaggatggttcatggtaagtgaaattttgtcattttataatacatatgaaaaaacttttttctctctctcttcaaattatgctattaccaataatgttactttatctggcaggtatggaacttggagcatatgtttcacttatggaaccatgtttgcaataaaaggattggttgctgctggaagcacatatgatactagttcttgcatcaggaaagcatgcaaatttctgttgtcaaagcaacaaattacaggtggatggggggaaagctatctatctagcgaaacagaggtaaatttcttattatatctaccaagatgtctttgttttggttttgaaaaaggtaatcaggttcatcttgttcgtttataaatttcttgtgatatagtgctattgaaagaactccaccaacctataggagaaactaggtggcattgtaataagaagatggctcccaaattggagtcaaagaggattcgaacctgagtggtgggggtgtgcacccatgcctcccacgctcagttctagtactactattaaatattgatttttcctacgatctagttgttgatttcttaaatgaagacttcattagctgccttgccaacatgaacttgcatatttgttggaagttgctgacacatgccataccaaacctatacatttagcccaactagagtaatgcttctctattatatagcatagtactcccactgttcacaaataccggtttctttcaaatatttgacagttatattatagcgtactacagactacagcaatatagaaattttaaaatgattttgatggagaacctaccagtatccttattgtgttgatttagatcctttcatgtaattcctttttcatattagtggtccatgctgaatgttcacctacaaccataccacaatgataagtactccctccattccaaattataagacgttttaaacttttctagatatattgtttttactatgtacacaatgtatatctaagtacacagcaaaagttatgtatcaaaaaaagccaaaatgtcttataatttggaacggagggagtatatattaccagtagggggaagtccttcctgtttcttcaaaaaatgagtacatgttgcaaaccacttcagattcggaaagttttttcagaatgcatgcaatcagtttcggaactcggatgtgttccatagcaaattatctacctgccaataatgctctagcaactgacataaatgttcaacttcatttcatgaaaaatttgaacaggattatgttgatggaggtactcctcatgcagtaaacactgcttgggcaatgttagctttgatttatgccggccaggtctgttcatttttccttggaaggcatgctcatttatatgagacaattttcatgtgtgcgtgtttttattttgggacaatcacattatctgatatttggtgtcctggccaggttgagcgcgatccagtaccattatgtcatgctgcaagagaattgatcaacatgcagctagagacaggcgagttcccccaacaggtgagtttttagttatcctgacagaatagtaatgttttggcagagttgtagtcaaaattgaggtgctaacaaatgacaataggaaatagctttaaacagaaagtatctgctaacattctaacaaataatgaaaattgatacattgttaatagagaagtctaaattcaaactatcattggtttgcagcaagtaagatgcttgaagtgtcatctaaagtgatataatatatttactgacagatggcaattagcaatttcagcaaccaagcctcatgctttaacctttttttttatgctaggaacacgttgggtgctttaactcctccctctactacaactatgccaactatcgcaacttattccccatttgggcccttggagaatttcgccgacggcttctcgcaaacaagagcttatctcagtgcatatgattaccgtactgtaatacgcatgcccaaggtggaaataagaaagcattgttcttgttcccaacttttccct

SEQ ID NO: 5096 - DNA, 6220 bp, Sorghum bicolor
aattcaaaaaatttacaagatttcttgtcacatcgaattttgcggcacatgcatggagtattaaatataaattaaaaaaataactaattatacagtttgcctgtaaaatcgtgagatgaatcttttgagtctagttagtttattattagacactgtttcacaaacacaaacaaaaatgctattgtgttaaaattctaaaagtttttacatctaaacaagactgaagtcttttggtagaggagaagagtgcttgctcacgagccctatgacacaatgccctgcatttttttcgctaaagccgtgattttagctacttcctatatactcataaaagaagtcgttttggataaagtttaaatcaatcattagaaatataaatcataaataatttttaggttgttgaatttaaaaatattaaaaccatatgaataaattttgtttaaaaaatatttttataaaaataaaaatatattattttttgataaatatttttataaaaataaaaagtcaaagttaagtttcgcagaccgttgtcttagacgactttgatagggagtattcaacagggtattgtttatccttttccatgtgccaactcatgtttgagagcaacagttggggcactgatctgtccttgctcgctcctcttgcagtagaaaaatacagggggccagatttctgcagggaaaaggcaaactagcatcggtacttgctattcccgttttcccaaaagaaaatccctgtttttaggccaaccattaccaaccagctgccctgccagcgcgagaagatttctcactgctgatttcgattcgctttgcccaatcggaggcggcgacatgtaacagtggagacgctgtagaggatctgaccagggagggggatgtgaggccatgagatttcagatttccccattccccttcatagcccacccaacctgcacatgatcctgctgttgtgcacactgattgatgagaactgtagtggctttgtcctctacccaccaccagtctgaatcctgccctaccctttatacactgcccatgacgccaatgatcagaccaaacaccagctgcaaagcaaagatcaccctggattcctggagcacgaaaagaaaaagcctagaccaaacatcatttggtggagctggagcgagcagctgttggcacttggcagtggcactgtggaatctggagagcgtaggtagaaaagcaagcaaccccatggcttcatattcatagcaccagcacccccccctgcaaccaggttaggaactaatatgctttctttgtagtaaattagaatatattgttccttctttttatagatctttccccatacttactcactcagtgagatgcttgctccgattgggaaaagggaatcggccatcttggggttgttcactgtccagttcttccctttcttcctttttttttttggagcagtggggtggttgaggcatgtgctgatgtgcatgctggctgatgtagcctgtaactgtatggtgaggcagacttcctgcatcaggtggggttcatggacacagaggtaggagaaaggttgccatctcgtgcgtgtgtgttggatggatctttgtcttcttgctttcgctttcttgggtcccttctcttttttagctgaaaactctcatggttcttggtttttcttgtgcctgccagtgccaggtataattttaatcgaataaaagattcttccgagtaaagggggttaaatgcttgattccacatccagcatttccctccccttttttctgtatatatataaaaaattccttttcttatggtttgcatcctcttggttgcctccccaaaagcaactggattcggtgcctattggttcttgtgttggtgggaacagtaaggcagtgcaaataatgcagtgctgaggtaattgctgcgaaaggttagagagggttaagacgtgggtggttgtgatggtggatagggatataggatagggccaacctagatggggctgagccgctgaggataggggaggcatgcatgatagagacctcaaaggccaggtgagagctcagtcgacggtaatgctgtcgcagctcctttagttgccagacgattggcatgccacgattcctggtttcatctcgctgagttagtttgacttcaaggcttgtgcggtgttgctgattggcaacaagaggttcaggaataggcggaggatttggttgtgttctttctgtttcgtcagggaaagggatttgaggtctctgatcttttttttccccctatcctattgtctagtcattctgttcttgccgtgattctctcactaaatgagctgcacatgattcattggcagagtctttttgtacttgtttatcttttgcgaattataagtttataagcagttgagtttactccatctgtatctgtttcagttccgcactttgtctttgacatttattctttctattcttccatgcagttctgccagctttcacatacacaggttgggggagcagttgagattttctaattcttcttcttggcaggattgagatcttcagttctggtaatgggttctttcgggatgaactggaatcagaagaactccatggtgtgggattgggaacatctagtgccatctgtctcgaatgcagttacaaggcatggatctgctaattcatctggtggtactcttacttctagctcagagctagggcatggttcatccaagagctctatttcagcatccattgattcaccatctggagtagggaacagcttagagttcaattttgccgctgttcaaaggcatgttaagaacacgggcaccaatggcagagtcgatgactcagggaattctccatcgtcaatgatagccttcagccaaggagagccactgatcagcctcaagcttggaaaaagggcttacttcgaaaatgtctgtggaggacaggaggccaaggtttctgcaccttcagatgttacttctgcagtcaccgtggtcaagaagactaaggtgtctcagcagaatgcaaagaactggtactgtcaggttgaaggttgcaaagttgacctgtcttctgctaaagattacaaccgcaagcacaaagtctgtgtagctcattctaaagctcccaaggtggttgttgctggtctagagcgccggttttgccaacagtgtagccggtgagatttccttacatttgcactgagttctgtttcattctaaagtatttctatttgtattttccaagttacaatttttggcatctttaaagggaggaagctttgataatgtgaccagctgaaagcaataccaccccactttagttgtagaccgaaatggacagtgagtgctagtctatatgatgctcaattattctgctggctcagactcatgatatttatggttatttatcctttgctgattaagatgtacaggaacgctagcatgaaatgaatagtgaaggaaaattggcatttccttttgtttctggcgctagttgcaatggtgtatgagtgccagcatcttgagaaggggaaattgcagacaagcttataactaaaatttacattttgatctgttattgacataatgaagcttcatttccctcttttctttaatccttcactgcttgtaggtttcatggtttggcggagtttgatcagaacaaacgaagctgtcgtaggcgtcttactcatcataatgcacgaaggaggaagccacaggcagatgcaatttcattcaattcatcacggctctcgtcaatgttttatggtagtactgaactctcaaaaacaccttctaagctaatgagctacatgctactcattcagtacctctttacttttctacgcagcctgcttctgaatcttatatgttaaaagagcactttatacttcccgcaaaaaaagagagcactttatataggtatcaaatggctaatctgctattataacttgttgagcggttctgcccatattttcagattgacgattgaatgcaaaatctttagtcaatttacgcttctcaaaatattgatgatacctgtttcaagcagtaccaataaacatcagttcagacttcagatctttacaaattcatattcaccgtgttagtcaaggacttatccaacttcatgacacttttagtcaccacataccatgactgtataacttcacttttaggcctcgttcggttaaccattcctggcccgtcatttcttcagtattttgaatagcgcgggaaccattcctggccaaaccaggccgggaacatggtaactgaacagcaccttagtgggattatccttagcatgttcctgtttctctcttgatgtcttttttccccccttgtgcagaaacattttagttagccaagtaccaatttccttggaactgaatctttgttgttgttgttgttcttatagaaacattttagtcttaatgatggtattatttgcatttgcagatacaagccaccggacaaatcttttctttagtcaacctctctatggccaagtgagaagcaatgcagtatctccgtgggataactcgggaggcttcaaatttatggaaacaaaacatctgtcagtgcagccaacaaaaacagtaggcctggatgagctgcatttctcaaccccccagatatcaactagtgttgtggcgcacactggacatcatcataacttcgataggttcatgccattcaagggaactaacacaaaggttcttaaccaaggtactttgctaatctacggatctgttactgaacttgagaaggttaaacagtgaaccctgacagcactaaaaagttaaccatgttgatgaagtatctgagtgtgatcagctcttacaattcctaagaaactgtgcagatgatctctcgcattatttgaattattattctccagtaagcactgctttttaggtgacatcacaatatgttctgtacactaccattctaattcctagcagtttcaactttcacgacactgaccagcatcttgttctttgtggttccaattcgcataatactattaacgttacactttctaccagtgatgatttcactaggtggtgtacattttagtattccatacaattcggtgctactgatgcgcattttacatctgtgatagtttcaggtgtggaagcttcggcgaccgcttccaactctaataacggagccccagaacctgggcgtgctctctctcttctgtcagacggttcttggggctcaaattcagccgtcatccagcagcctccttctcacgcagatgctggtgcattgccgcccctcgccaccgttgctgtctccaacaccgccgccaggcatcctcttgacccgtccctgggaaggttctggcaagacgatcatcccccactcgacggacctgcacctcagattcaggaactggcgcacctccgaacatggtgaaagtgaaagataaatgtatctgatgccatctcgaggacctggttgggaacttctggctaggcattttgatggcaatctgtggctctggtttgaatttgccggtgacagtctttggacaatgtttaatttagctgttttgatcagaacgggcacagacatgtttgcacaatgtgagttcctctatcattggggatgagtgaggtgaagatgcaggaacaataggagacaaaatcttaatttttttgctcgttttcccaccagtatttgaattattaattactaggaccacttgtgtgcttctgcttctgctgctgctgaagcaggtttattgaagtgaaattcatggttggtaatgttggacatgtttgatgacatcgagcttgctcagatgcccatcaatatggtcttttgctcagtagtatcagtactagttccggggctgaccaacatgcacggagcaggcgcgtgagcgcgtgccggatcgctcgctgttgcccgccaaattaaggcaaagcaggcagggggcgaggcgggctggccaccacccaaaagctcgggccgccccctgctccgaccattgcctccgccgctcgtctccggtccctgcctattcatttgtctctcccagcagctcaccgtgcctcctccatcggcatcgacctggccggccgagagagcacaccttgccgtctctctcccgggcgtgcgcgcgcgcgtggtcggaggctgccgtcgcttgcgtcggccgcccccggccccgatcgacacagccgccggccggccagca

SEQ ID NO: 5097 - DNA, 10153 bp, Sorghum bicolor
tactcctcagcctctacgccaccttgcagtcaccacacaccgccaccccccgcctcgcttgccaccacgttgccgcagcccgcgctcgctttcgcgcaccatagccgcccccctgctctgctccgcgctcgcccagccctgctcgccgtcgcgtgtagctaccatcacagctctgccctactccacacccactcagatttgttggcgtgccccttccctccctatgctccaccgcttcgacaaccagctttgacgacgtcctcctcctctacaacgactccgtccccatcctcagcatccttcccaacttcgatgacttcttctctccactacggcggggcccttgaatgctggccgtggtaaggcagagctgccacgcgaccatcgcattgatccgactccagtcgccccacgcgtggtggtggtggtgggtctcgctacgtggagacgcaaagagacagaaggaggtgatcttctttggacccaaaatgcgtcatgggtttgagatatccgtttggctgccataaaacactgtgcatgagtcatcttaggtatgggtcaccttatggctatcttgttggggacagtcttagtcactccaccattttgttcttctaattgtgatactctactcaacataatagagtgatcaagagctaaggttatacgtgctagaagatggttttttagctgtttttttttctgtaaagcttcttgttgatctcttgctcgttgatcgatcactactaagctttagcattcttataattctatgagggttctataaatcaatatctctttcgtatgtccactatcctttacacatactaatttgtagtaagtccttggattaatgttgattgttagagtttgcctagctcaaagttttgttgttgaataggtcactattccacaaagccctccaagagcttgaaaaggtgtgtgtggtgggagacacagaatgtgtccaacctagctcctaaaagggatattactgtaccaagagactataatatttgttacaaaggattaacatagcattgcgattgtcgatccttgaaaaatccattgatagctattttaattttatcgtgaagacgttgcttagttgcctaaaaagtcatgtctgaaagtactgttcgctaatttattatgagagaaaaatactgtctaaaaaaactacagattatctcatgttaagttgttttatttaagcatggataattttttttttgaaccaaacgtatatttttcccttaatcccttaaggccctgtttagattggagatgaaaatattttgagtgtcacatcggatgtgtcggaaggatgtcgggagaggtttttagaaactaataaaaaaacaaattacatagctcgtcagaaaactgcaagacaaatctattaagcataattaagctgtcattagcacatgtgggttactgtagcacttaaggctaatcatagactacctaggcttaaaagattcgtctcgtgatttttaaccaaactgtgtaattagtttatttttttatctatatttaatgttctatgcatgtgtctaaagattcgatgagatggatgaaaaatttttaggtggtaaactaaacagggcctaagaaaaccgcggctggcgtatcatgctactcagacagacagacctcaaacctcagacctcagagttggttggagttccagctccacctccgttgaagcccagccatagccagtcagccaccgctagcgagccgcgcgctccatctccatggacgcctgctctctcgtccgcctccatctgccacgaccactacagcttccgctcatctcgcctccaattcccagccgccggcgccaccgccgcgtcgccagcgccgtggtcggctgctgctgctccgccgccgaagcagaccaccaccaggagcggccctgggagtggtacgaccgcgccatccaatcccacgcggggtccgacctggcgcgctccctcggcctccttgccgacatgcaggcgtcgggggggcgcccgagctccggcgcgtacgcgcgcctcatccgcgcgctgtcccgcgcggggcgcgcgctggaggccgaggcgctcctcctcgagatgcgccgccacggcccgcgcccggacgccgcgcactacaacgcgctcctcgagggcctgctcgccgccgcgcacctccgcctcgccgaccgcctcctcctccagatggccgacgacggcgtcgccaggaaccgccgcacctacacgctcctgctgggcgcgtacgcgcgcgccggccggctcgaggactcgtggtgggtgctaggtgagatgaggcgccggggcatccgcctcgacaccgccgggtatagcatgctcgtgcggctgtaccgggacaatggcatgtggaagaaggccatcgacctcgtcatggagatgcaggaggttggggtggagctggatgttaagatctacagcggcctcatcgacacgttcggcaagtatggacagctagcggacgcgcgcagggtgtttgataaaatgcgcgccgaaggcatcaagccggatatatcgacttggaatgcattgatacaatggcattgccgggtggggaacatgaaacgcgcactgcggttcttcacctccatgcaggaggaagggatgtacccggacccaaagatatttgttatgatcatcagccggttgggggagcaggggaagtgggatgagatcaagaagctgtttgatggcatgaagaatcgaggtttcaaggagagtggtgcagtatatgcagtattggttgacatttacggacaatatggccattttcgtgatgcacgtgaatgtatagctgctcttagagcagagaatatgcagctttcgcctcgtgtgttttgtgtccttgccaatgcttatgctcaacaggtcagtctaactactaaacttggtttaatcaattttacctcatggcatgatagttttttccaccatattgaaactgaatatagttgcaaatgcctttgattacatcctaacattgtatgtaagcatgttgcagtaatgctgtaaaccttgaaaaaagatttacagtttgttatttgagagaataagatacaccatttctggctttggaaatattttcttctgttctttttagaatatatgatataccatttctaggtttggaaacatgatattttggacactggatccatgacatccgtaaataatttagctggatctcggacatctttgtttatctggtcagtgctcagtacaacacctgatgttgacgaagttgataggcattgctctgagaaataaaatagcagtatcatgagtcatgacaagcagtgctgcatttatctagacaggagttatatgacattgtgactaagctgatgtactttcccccatctgtttcagcactgtagctggaccaggattctttaggatatagtgcatttgagaaccgacattcagttttttgttaagtacaattaataagcttggcccactgcagtaggtcaatggcaatacaaccttcaactattttctgcatttgccttttccttaggggagagagggttaatatgtcagtagaacatcgatatctgcctgtccttgtgcacatgtttcaacccacgtgaatcatgttggctgcttactcaaggagtcaaggtgttacctttctctttcaggggttgtgtgaacaaactgtcaatgtacttcagttaatggaggaagaaggatttgagccaaaccttgttatgctgaatttgttaatcaacgcttttggcactgctggaaggcatttggaggcactagctgtattccagcatatcaaggatagtgtatgtacctcatttagaaatgagatgaaaatgtttttttttttcaaatttgtttcaagtttatgatgttttgctttctttgcacttacctgtttttttcttagggtatgagcccagatgtcgtgacatacactacacttatgaaaacattcatgagagcaaagaaatttgaaaaggtctgctactttatctccttttttgtgaaattagaatagccacgtgcacgtgtggtaacatattgtcaagggcgttattgcccagcgacggcggccctcggctacgtagctcgtagccttggtccgtgataactggcggggttatgccccctcgcctgtcctcgcggacgggttataccccctggccggcggcttgagaggaagaagagagataggtttaatcttgcttgatttcaaaaggtctccaattacaaggctttatagcctggattcccaacaagaaaggaaactaatcctctaaacttaaggaaacctgataatctctttctaaacaatccctatcttaccaaacctggactctcctaatctgtccaagccgcctgggcgcctggctagccactaacggcgccagcccccttggccaggctctgggcgcgctcagcggccctgcgcacatcgcgcagcctgcgacgcctagtgtaagtatttccccacatgacatctctcccctcctcgagaggcagctcgtcctcgagctggaactgtgggtacgaagcgcggaagacgtcaacatcttcccatgtagctgaagccggtgatgaccccttccacttgatgaggacttgacgcacgcccctggccaagcgtgacttgaccacttgctcaggctcgggcaccacagcgccatggcggagcggagggaggggcggtggagcggctgggggctcgccgtggaacttcttgagaaggcccacgtggaacacgtcgtggatgcgagcttggggtggcaggtcgaggcggacggcgacgtcgttgatgagctccaccacccgatatgggccgtagaacttgggcttcagcttgccggcaggagccctggacagggacgcagcaggcctctgtcgaaggcgaaggagcacccagtctcccaccaggtacgaaaccggccgatgaccccggtcgtagtggcgtttttgaattgcctgggcctgctcgaggcggtgcttgacgtcggcgatgaactcagcgcgttcctccatggtctgagccactgcagcgacccgggtctcgcccggctcgtaggagcgaatggatggcggatcccggccgtacacaacacggaatggagtgtcctggagcgaggactggaacgcggtgttgaagacgtactctgcccatggaagccaacgcagccagtcgcgaggtctgtctcctgtcaggcaacgcaaatacatgatgacgactttgttagcggattcggactgcccgtccgtctgggggtgaaaagctgtcgacatctgcagttttgtgccactcaggcgcatcaactcgcgccaaaagttggaagtgaacaccgtgtcgcggtcggacacgatggactgcgggatgccgtggagccggacgacgtctgcgaagaatgcttgggccaccccctccgccgagtacggatgcgccaaaggaatgaagtggcaatacttgctgaatctgtcgacgacggtgaggatgacggacttgcccttaacgcggggaagggcctcgacgaagtccatggcgatgtcggaccacaccccctgcggcacgggtagtggtagtaggagccccgctgggtgaagatgctctaacttgtggcgctggcagatggagcagccccgcacaaagtcctgcaccaccgtcttcatgtgagggaagtgaaaatcgcgacgaagtcggtgcagcgtgcgctggaccccctcatggccctcctcgtggacggcgcgcagagcctcctgcagcaagggggaggccggtgggaggtacagccgcccgctgtacgtgaccagcccgtcggacagggcccaggggagcgcccgtgtgcccgcactgatctcctgctggagggcgacgagtgccggatcggttgcgtgagcctggcgcagacgctgcacgaactcgaagcggggcgcggacaacactagaaccgtgccctcctcgacagtatcccgccgtgagagagcatcagccacggcgttcgagtgccccggcttgtactccacggtgaagtcgaagcccagcagcttgccaacccagtgatgctgagggatggttgacaagcgctggtccagcaggtacttgaggctatagtggtcggtcttgacagtgaagcggcgcccccataaatacggccgccaatggcgaactgcgtgcacaaggccgatgagctcgcgttcgtaggcggcgagagcttggtgacgtggcgccacgggacggctgaagaaggcgatggggtggccctcctggaccagtaccgccccgaagccatgcgacgatgcgtcgcattcgacgacgaactgcttggagaagtccggcatggcgagcaccggcgccgaggttaccgcgtccttgagggcatcgaacgcagcagcagcctcggcggaccacgagaagccgtccttcttcagcagggcggtgagaggtgctgcgatggtcccataattgtggacgaacttgcggtagtagccggctagccccaggaacccacgcactgcccgggcggaccgtggctgcggccagtcccgcacggcttggagcttggcggggtccatggcgacgccagcagcagagacgacgtggcccaggtacgcgaccgacgctgcagcgaacgcgcacttggagcgcttgaggaagagcttgtggcgctgcagctcgtcgaagaccgcacgaagatggcgtaggtgatcggcccaagtgctgctgtaaatcaaaatatcgtcaaagaacaccagcacaaaacgacggaggaacggacgaagaacatcattcatcaaagcctggaacgtggccggagcattgcatagcccaaaggccatgaccaggaactcatagaggccatcgtgcgtgcggaacgccgtcttgtggatgtctgccggccgcatgcggacttgatgataccccgagcggaggtcgagcttggtgaagtagcaggccccgtggagctcatccaagagctcgtcgaccaccggtatggggaacgcgtctttgatggtgagcgcgttgagcgctctgtagtcgacgcagaagcgccacgacccgtccggcttcttgacgaggaggaccggggacgagaacgcggagtcgctgcgtcgtacgatgccttgctccagcatggcggcgcactgccgctcgagttcgtctttgtgcgcagcggggtagcggtagggccggacagccaccggcagcgcgccgggcttgaggacgatgctgtggtcgcgggtgcgctgagggggcagaccaaccggctccgcgaagagactcccaaaggcgagcagcagctcgtccaggagggtcgtcagtgcagtcacggcggcggtgagggctggcgtgggtgtggccacgtcggaccagcacacgcgcctgtcctggcgggtaaaggacagcgtgcgcgcggtgaagtcccactcaatccggcccagggtcaccagccattgggtgcccaggaccagatcataaccggcgaggggcagaacgtagaggtcgacgcagaaaccctcgccgtcgatgatgatcggcgcctgtcgcagcacgcctggacacgcgatgcgttcgccattggcgacggtggcggtgaggcgcgggtcggcgaggacagggaggccggtgcgcgtcgcagccgtctccgcgatgaagttgtgggtagagcccgtgtcgaggagcgccgtgagggtgacgtcgcccacggccactcgtacctgcatcgtatcacagatgggcatacccgtgacggcgcggagggagaacactggggcggctggctcggcatcgtcaggaacggcctcgtcgtctgcgagctcgaccccatcaatgaagaagatacggcggcagacccggttgtgacccctggaatacggctcgttgcaattgtagcaaagaccgaggcgtcgtcgttcggcttgttcctcggtcgacagccgcttgacctggttgggcgcgcccctgggtggcggtgctgggagtgctggcagggccggcgccggggccgggagcgccaggggtgccggagccggtctgaccgccagccggggtgctggaccagcgcgcggggctggtggcgggagcgtggcctgggcgcgatccaactccatcagctcgacctggcgcgccagactcatcgcggcagcgagggtctccgggttgtggatgcgaactgcgtgactcaggggtggggcagtccccctgtgtagagctgaacgcgctgggtctcctccaatctcccggcgcgtggtagcagggcctgaaaacgattagagtaatcttcgacagtacctgtgcggcgacactccgcgagctcgaagagcggagccgacctcaggggcggcccaaaccgcaggtggagaaggtctttgaagcgaccccaggaaggagtgccctcgtcctcttgcaactggatgaaccagagctgtgcgacatcttcgaggttgtaggacgccatccagacgcgctcctctgccaaagtgcgctgctgccgaaagtacgattcgcacttgttggtgaagagcagcggatcggacttgccgtcgaagcgcgggaaatcaagcttctggaacttggggggacgatccaagtcgcgctggccgccgcccgtgctctcggacgtcgaagccgacttctccttcagtgccagcatgtcggccttcatggagaacatctcctccttgaaggacttcagcatctcgacgacatcggcgatggtgggatcagccatggcgggtgggggacaggtggacgcagtggaggacgtaggggttggcggcagggcagggtgggctgcggcagtggaggtttgagaggtggacgaggatcggcgtgaccgtgtgccaggttgtcaagggcgttattgcccagcgacggcggccctcggctacgtagctcgtagccttggtccgtgataactggcggggttatgccccctcgcctatcctcgctggacgggttataccccctggccggcggcttgagaggaagaagaagagagataggtttaatcttgcttgatttcaaaaggtctccaattacaaggctttatagcctggactcccaacaagaaaggaaactaatcctctaaacttaaggaaacctgataatctctttctaaacaatccctatcttaccaaacctggactctcctaatctgtccaagccgcctaggcgcctggctagccactaacggcgccagcccctttggccaggctctgggcgcgctcagcggccctgcgcacatcgcgcagcctgcgacgcctagtgtaagtatttccccacatgacacatatgcacagaaccttaactgttggtaatggttatgaaaggtcttgttttcagctcttgaatatataggcttcaaaattttgttgttcttgattaggatggtagaatataaaattaactgatcttattgtatgtacctgattaatctgaaaacattgaaataattctgctcctggcttgagtaggtatctgaagtatacagagaaatggaacgtgctggatgcactccagatagaaaagcgagagaaatgttacatgatgcaactgtagttctggaacaaagaggatgtaagtatttcatttcatatgactggtgctttaagggtgaatacaatggatgagtggtgatgtatgcaaaatgctttgacaggtatctattgaattgaaactcttgatattgtaatccgtccattgtcaatgcttgtaacttcagggacccgcctccctttttacttacacatgcatgatgcagagcaaacacagggtaggcaattagttttacaccttgatttatggcattgtctcttctccagtttttcattctgctaacaccacaatatggattatcatttttgcattaagttgttccaagttccaagaaggtatttcagtttcttttacttaattttctactgctggatttgatgcagaaaacagctggagataacattttgtttagaccattgaggtctggccatcaacttctgtggttaaccgtacaacatgtaaatgttgctttgccatgtgcccatgcccatcactatttccatttcaactttgaaggcatactttttttttcaatatacttcatctctactttaaaggcagagtatatgagtct

SEQ ID NO: 5098 - DNA, 5702 bp, Sorghum bicolor
ctcggcgtcgacgccgacgagtggggcgacgagaacaggaggatggccaccgagctcagggagcagcagcgcaggctcaggaaggcgctggaggatcaggtgcaggtcagcagggagaccgccaagatggcgcgctgggtcaagcaggcgtccgcgcgcatgacccatgtcgaggccattgacgatttgctcagtgactgcgaggacgatgaggagctcaaatgagatcacgccgcgccgacgccgctggttttgcctgtcgtgctcgctggttgttccaccgtcttgatgatgatcacaaatctgtcaaaatttcttatatgtttattagttctatatagaagaaacatattattaggatcaagcaaaatgtatgaactgatcgtgtatgtaaggattcggtgagtgttggtataggaatggagaacctgctattatgaaaaagatttgatcatgtgtttcctgtatagattatgcacgatgaagcccataataacaggaagaagcccataattcagtatccatgagacaaccaagtatttacacttggctcatcttctaattttagtagtgcatcaaatatctacaatctgtcaggattgaatcataattgcttgatcctactttgaatatagtcttttagcacaaatacagaatttaagcagcataatgtgatactatgaagcagagtaaaaaaaaaagaaaagaaaagaaacaattggcattataaatagtgaagatgagaagttgtccacactctaccacttgatagatagctgattgcataagctacatacagttggatccagttacacaaaagtcataaccagacacctaatgtttccagcaataccttatcacacaaagttcctaacatatgactcagaacgaaagcaacgtaaaggaaatccacaatgttgatgtacttcattatccaattatgcatctcactgtccatgattcaaaatttcttatatttatccctgatacagagtcttgccttaaccataagcctgactacgtacaaaggcgaaaagaataccggttttatcctgcgctgtaacagtaaaaatgaatgtaagtaatgcttcattgtttgcttaagtgcaaaccggcactggtaaaccccatacctttttcacacttttgtccagcataaacaatcaagagccttgaaaatacagagttaagcttgttgctgtgaccgtcccaaactttgcaggcaatgcagttgatgaacagatgcatcaaactgagtcacttctgagttctgagagggtcggaatacgccaagctactttgcaagcagagaacttccagatggatcaacatttttcacgcctctgaaaaagaaaccaatggtgatgactgtccctacagattcagcaggaccattcaagacaggaagtagcttgaccgagaaaggaaagaaagaattattggtaatttactggaccctttcaggctctggtaaacctgtcccaaatgtatctaaaaggaatgcgaaatacacagcaagagactcttctcaagtgtctggcagctcaaggaagcgagcaagaatggcagtggacaacagcgttttaatttcattattaaaaaaatttcggtcaccctccaaaattatcaaaattagtgaaattcaggcaaaaattttttagagactctcatgtgaagtatgttttttctacaaaaatttagatataaacaaacattagcatgatttatgactacacatctattgagtagaagaattgcaacttttttgcagccaaaaccaaccattgtacagttacagctgctccgactgcaaataagctgcattcctggcgggcagcccaacaggcccgtcgatagagggagctgcaactatattctgcggctgggcccaaagaactcctgcccattctacaaagcccacagcgggcaaaccctcaggctctctactctattaaaggagcataccctagcgtctccacccttcatcctcgcagtcatccccgagaaggagccgccgccgccgccgcgcaaacccgcttcgacgccgtcactcctcctcggggcgcaaccatggtggccgcaaagaagacggtacctatctcccgctctctcacatctatcccccgtatctcgaccacaagcccacgtttctcccgccttttccgtcgatctgctgacgtcttccgggcggcactgcggcagtatggcatgcaatttctgttctaagctttgttttcttcgtctttgttggttttctgcagaagaagtctacggacaacatcaacaacaagctgcagcttgtgatgaagagcggcaagtacacgctcggctacaagactgtcctcaggaccatcaggaactccaagtgtaaggaagctcggccttgctattctgtttcatgcgtaaggctgctagattaactctttagaacggtgaatcggtgcctatggatgtgtgcctatgtttctagatcgtagatagtagattaatcctgtgggatggtctagttgttctttactgctgaatgtagattagaattggcaatggccactctatgaatagatgtgatgaccattagttttactagcttgttcgtgtgggcttaatgatcgttttctagctggtgggggcatctatgattgtgcacagttacttgtaacttttgttattccaactgaagagaacaaacaacagaagtgaacattttttacatgtcacaatgggaatatgactttgagagaaggagaatagggccttgggttcatgacctcagccactataattttatggctacatggacgcccaccaaaatattctctggacaacgtattttctggacatgttatctgaatgtttttcgcctctataccataatgttgttagtcgaagtcgaggatatgatgatcctttccccagatgatcgacagtgaacatactgagcgctataatttctcattgagaaaaccaagccagaattctgatcctctatttgtgcagaaaaattgattcagattttttgtgaagtgctttttttgttgcctcttttcaaaatatgcgtctctttttgtatttttttgttctcttaattgagttttacatacccaagaggatatgatgaccctttccccagatgatcgacagtgaacatactgagcgctataatttctcatttgagaaccaagccagaattctgatcctctatttatgcagaaaaattgaatcagatttttgtgaagtgctttttttgttgcctcttttcaaaatttgtctctttttgtatttttttgttctcttaattgagttttgcatacccaagaggatatgatgaccctttccccagatgatcgacagtgaacatactgagcgctataatttctcatttgagaaaaccaagccagaattctgatccttcatttcctcttttcaaaatttatgtctctttgttttttgttctcttaactgagttttgcatacccaagaagatatgatgaccctttccccagatgatcgacagtgaacatactgagcgctataatttctcatttgagaaaaccaagccagaattctgatccttcatttatgtagaaaaaatgattctgaattcatgtagtgatctttttgttgcgccttatcaaaattatgccactttttgagcttttttgttctcttaactgtgttgtccacttcagaggatatgatgaccctttccccagatgatcgacaatgaacatactgagcgctacaatttctcatttgagagaaccaagccagaaatctgatcctctgattgttatttgaaactcttcatatgttgatgtatttagaatagttattttttatatgtggctggcatttgagttttgcgttgaaaactgattaccaatggctgaatttagatggtcattgtgtatgagtcaacgccatagtgatccccatgtcgtccatatatgttactagtgtgtggtatcactggttgggcatgagtggagatatcttcttactaatttaaatttataattttgctttatagtgttttttggattatgttgtgttttgaatatctcctgtctatttattagatggtgtaatgtaaacttctttgctttgcctaactgttccttccacatgacaatatatatttaaatttagacgtgagtacatacaaaactataatgtctgccttttactatagaatttgtgcaatatcatttgttatatagcatgtaatattcctaaatcaatctattgatttacagcaaagctagtgatcattgctaacaactgtcctccgctccggaagtctgaaattgagtactatgctatgcttgctaaagtcacagtccaccacttccatggaagtaagtttgcatcccttacttttggttcttttaattgatgttgcatatgatctagtgaaatgtttaattgtcaactgtcagtaggcatggtaccttttaatcaatatattcttttgtaatgtctagccagttgcagaaaagcacaagaatcagtgatggagctgaggaccatgtcaccccatgcatcttaatgcttaagttatttattaacaatatcaactgaaaatatcattttgtcttccataaacccaaaattattactaattggctcccctggaaatatatttctggctatgtccatgatatgaatttacattgtaagaatgatgtgcatggttggttcctaccgtttgttttgagacatggttgtgtttgtctttgcaattaactgtttttgtgacattgtcctgaaattaacttcaatttgttgttttccagacaatgttgacctgggaacagcctgtggaaaatacttccgtgtctgctgcctcagtattattgatcctggtaatggctccaccctaccacaggtcaatttgatgttttgatcaaaatatggataggaagagtaattgtattctgttttcaggtgattctgatatcattaagactacaccgggtgagcagtaaggaagccacaccagtagagcgctcttgtgcaatagtgctgtagcggatcttcttgctggacttgtcttttgttttgttcctatagaatttacctgacagtaaacagagttcgtgggaacattattctctttgattgaaaattttgtacctggcaattgagtaattgacattgttgaatgttgaatggatcttatgctgaatgtgctcggattagaatagaactttcttgacgactctttcttgacgactctgaacattgagttgggtcgccagtattcttctaggccttttgcgcctctctcatctctcaccaccacaattttcctctagctccgtgcttcattttgaaacattcagttggggcgtcgtagtattcttctgcgccttttgtgcccttctcatctcaccaccacaattttcccctagcttgctgcatcattttgaaagctgctggacaacacctctttccaactgcatgacaacccctctttccaactgcatttcacacattcgatcaatgtggccgataagaccgtaaacttcgtgtgtctttggccctcctcgcctagatccatcaattgcttgcgaatgtccagcctcaccttgatcctcatatactgactgatagcaatatcatcgtcatccgcatcacctcctcaaatcatctcaccatcagcccaagggcattttcagcaccctcacctagatcggaat

SEQ ID NO: 5099 - DNA, 6043 bp, Sorghum bicolor
tttgtacttatcaatcatcaaaatccccaaaacaccaaattaatacctatcaatctactgtctttttagtgactaatgacaaaacaagtctatgaaaaatcaaaaaatattgaatttgaaccgatcataagcatgaaaagggttagcttagggaacacataaagagtagcacaaagttgtacataagcaaaatgtaaatgagtaaccaagagtagcccaaacttgtacacatgcaaaatgtaaatggtggataagaaggttgaaatgtctatattgcccttggtttctttctttatttttctttttcttcttgtacttattttgttctttctttcccttagcccatcgctccatgggaaatttaaacattttcatccttcccaatagcactcctctagatgccattttttgttttgcaattacacatttgccattaagtagacattgctatatatttgccacttttgtaacaatgtggcaaaccaactcacgttacctgtgtgtatatactaaccaactcatgttaccagtgtgtatatactatgggaaatgatgcttgtgcccctgccatcttctttctcttgctccctcacttcatgaggaccccacttgtcttcatctacctcctatcggctcccattttctttgtctatcgctggaacccgacccaccatggctgcacgtgcctgactctaccattcatgtctagcgccacttctgccctatacctaagggccattgcaggtgcagccacgccacatccttggactagcttgaaacacgcccgcacagcagcataactgcacacttggtgtgccgtagagctccttctcgtcgatccactagaggtacaagtactcctaggtgacgttgctctcgacgtggtccaagcgcacaacgaaggcatccatgtgcgccatccgcgttgttgtcaaagttgagcaacactacccgttgtccgcgtgccgctgccgtctattgcggagcaaagtgcttcacaaccatctcgatccatgaccgatcgatcctcaagctcgatgcgtacccccaagttcacctagttggggtgcgacatgcaaccgggtgctggtgaagtgcttaggtgcctgactccgccatccgcattgcccatgagcttcgcacgctatgccatggccgcgagctccaagcccacctcgttgccgcctgtgcatgcctcgttgcgttgtgctaggtcggcttgcatctcccaacgccatggatggaaggtgggagcgggaggagatggatgacacatgggctttgcgcgaggataaaaaggtagggcaagacatcaatttccatgtcttttcatgctgacaggtgaggccttatttagatgtgaattttttttagattttgttactgtaacacttttcgtttgtttgtggcaaatattgtccaatcatggactaagggtctgtttggttcccttgctaaattttagtcagctaaactttagtcactttagtagctaaagttccaaacacattgactaaaaaggagttaaatagtttagtcccactagtcacctaaaagtagctaaaataattttagctgactaaaatttagcaaggggaaccaaataaggcctaattaggatcaaaagattcgtctcgcgattaagctgtgcaactagtttttgttttcgtatatatttaatgctcatgcatatgtcgaaagattcgatgtgatagagaattttgaaaactttttgtttttttaaacaagtcgtgagttgccgtgtacatcatcaaaaatggcaaaaacaggtggtaaatgtgtaaattacaaacctaaagttctcttttttttttgaacttttacaaacctaaagttgcatacggaggagcgggggaggatgacaaatgtttaaattccgtgagcgggagaccggggatcctgcggcgcaccacgaactcttctttcttctccgccgccccaccgctcccgctcgggctaccaccaccgccccgcacctcccgtcgcgctgccgagcgacggcgcgcatccgtctcctccgctccgaccctcccgccctgcctcccgcgccatctcgcctctcatcgccgccccgcctcccgcgccgtctcgcctctcatcgccgctccgcctccctccgtcgttcctggctgccgggctccttctccgtcgtcggctacgcgcgtgaggagggagaaggagccgcagcgcgtggatccaggggcagcggcgtccatcccgcgtgagaaaggagaaggagccggtgagatctacttcttttctgctcctccttttcttgcagctctctctaagcacgttttgcggagattcgtcggtagcgagtagcgacggcggggcagtcccaggctcggcagaggcgtcagcggctccccctcccgcctctcgccagtcgcctcgcgccctcgccaaggctggagccagcagccgctgctccaccaaggcggtcgcgccgctttgggatgcaaacgggcctgcctgcgggttgcccgctggcccgccgcatcagccgcttgcagttgtgcgtaattctgcaggagcctgctaggatctgatgcactccttctttctcctgtggggtcttgcaggcaagaaacctagcagattgcaggatactgaagacgccttcatctatacgtgtgcgctcagctcaaatgcctttgtcctatctcttgctgtgtataatcactcgtctcatgtacacttatttcctcctgtatataagaacattagtaaaggtgttaactgttaggtgcttgagatgggggaactttcatgtccatgaaaggactagcgaactgatgaaccaaatgcctgctaggtcctgttcttgcatttgcagattgcacaatcacaaaaaggaaggaaacgtatggacagataactgaactcatcagggctactggcaacagctacgcatcagtgctgtaacgccgaatcgctgtgatgcgggttgcaggagatgtgggcgttgtaactctatgcaggcgatgtaggtctatgcatgaaaatgcaggtttgctgattaggtccgctaggctttgcagactgcccactttaagccgtcttggcaaaggcaggtgttagtagggacctgctacaacattttttgcaggcgggcccagcagtttagcaggtcttgcgcccatttgcatccctagcgcttatgccccaaagcaaagcgttacctgtcagcttagcgcttcagcgcgctgaagcatgtgtttagtgctgccttttggaaacctgccagttatgtgttgcttttgtgataggtatccctgtactgtgccggcttgttcttcctctgagttacaggtttaaaaaataaatagtttgacattaatataaacatgatttcaatttcatcaacttgttgatgaagttttgatagaagggtatgcaaccttgctcttcagtcgttgactttagccattttgcgatgattcctaagtgcatagtattgttcacttgttcagctctccaatactatagttgcacattatacaaagtcacatagtccttctattttacaacattcaggtttggatggctgcacggaaagaaaaccctgagcttattgcttgtcaagcacccaatggtcgaatcacgcgagctcaagccgctgcaaatcgtcgaagctttggtgttctcccttctgttccactgcctgcaaaaactgatcgaaaacagactacacaagggaagatgaaaaggggatcttcatatgacaacactagtgcaagtactgcaatttctggcccccagcctaagaggcgcacagttctcagggatgtgaccaatttgcgtaatgctaactctaacaaaacttttgctgctgcaccgaaggttcaggtattgagatgttccctgcataattgcattattgtacaatgagttcttgatgcgtactgtttcctaaacattgcaaatgtagtagaatgacaaggttaactcctttttatttatttatttatttcagacaaggccctccctaaggactggaagaaccgtgaccagaggcaagcagtgcacaaaaaggattcctaaaataccccaaccagctggtaatggtggttcattcgccaatgattcgagcattgccgaagaaacacaagagaaacttttggcacagaaagaagaacctattcttttgcttgagaacaggggctcactgtcattgcagaatgttgaaaggaacagggacagtgcttgtcatgaggcattctttaaggaaagaaatgtcagggatatatgtgaaccttctgtgtcaaagaatggtcagttccatttcctttttgagcttgaaatttgctcttaaagatttgccagcatccccagccacactgagtctgtataacgttcaaggtttttcttaccttaatattttacaaaatgcagcttgcacccttgcttttacttgagtataatcttgatggtctttctggagtattagaatctgaagaaactaaagcttgctcctagtgttctttattttgtcatttctgagataccttgtagataatcttaacgtttctgattagtgaccatctgctaaagattctgtattttcttccaggggactcttctgtgttagacattgtagatatcgacaaagataatggcaatcctcaaatgtgtgcttcctacgttgtagagatatactcaaaccttatggtttcagaggtatgctgttgtatcttgatcaaaacagaaattctgcttagttgtactgttcaggcagaattctatttaatttaatatatttcagatggtatgttaagcatgcaagaactccagatttagatttctgtgttatattcttggcacattgtgcttgtttaaacggtatgtgtctatctttatgtttatgtcattccacagcttatgagaagacccagtccgaattacatggagggtttgcaacgggacatcactaagggcatgagaggaatactcattgattggcttgtggaggttgttatatctacaattctatctggatttctgcttatttcaatacactgcattccatagcatcactacgttcttaagttgctatcagctgattcaacagctttccatagcatactctgcatagaaactgatgcacatatctcccaaatgtgaaggatgacccaacaaataagaaaattactgctatttgattccaataaacaggagataaattatactgtatgtttgaatcagttgctgatgatgttaaaatggcaaaataatgtttactttctttagagacaaacagtctttgtacatctcatacacacagaagcatctagtttgtcttttgtcttataatgaaaatattatatacctcttactgtctattcctcacttctcatgattgatgactcggtttaaggtggtgttatatattgtctttgtcacaggtttctgaagaatacaagcttgttccagacacgctgtacctaactgtatatgttattgaccggtttctttctcggaactacattgaaagaagagactacaacttctgggaataacaagcatgcttgttgcctcgtgagtttatgctctagccattttattttttaggtagaaaactttaaaatacatagatacatagatgtaacataagaagttttccctacaagctagactagtttcctctttggcggatgtaatgaataactctgtaagtaaagtaatttttaaattcatttgcagaaagtatgaagagatatgtgctcctcgagttgaagaattctgtttcataaccgacaatacatacacaaaggcagaggtatttgtttcatgtgaagttggggaaaaactaattacatatatggaagaaattgttgaatttgtatctgataaccccctgatccagtaggtgctgaaaatggagtgccaagtgctgaacgacctgggatttcatctttctgttccaactacaaaaacatttctcaggttacctttcccaaatacgcctagtatctcttttctaatgggaaaccgctgcaccattactaacatgtctccc

SEQ ID NO: 5100 - DNA, 7978 bp, Sorghum bicolor
ctccttttttttttctttgcatgatttacattaaataaacctgataaaaatggtggcattttattatttaccacctttcctgctgctaggaacttttcatgttctaaactcacaagtaacacctgttctattgctcttttttcaggactcctgacagtgtttatggcctctccttttcggagactgctggggcttcccgttctgcctcaaaaggaacgctgtataaactgctagctcttctatgtaggaccgcactggttcaaactgctatgtgtgtgagttcgtcgcccatgatgcttctatggtgcctgaggcgattcaagtttgttagctctagagctgacaagacatccttgtttattttccttagttcccagatgctttctgatcaagtgcagaactggaccggatctgaaggagtcgaacatgaactggttaaaaattggcatatgtggtctaagacgctcagatttttgtagagaatctcaagtttaatgtaaaccctgttgcccatgtagatgcatcgttcctgaaatccctttgtgggtgccatgtctctctgctgctgtgtgcgtgatctgagggaacctggattcgtttattgtttgaatgttttactatttcattcgcaaataaataatttgttgcattgattggaatttgcatggttagtttaataactttagccctgacaattctgatgcatcagcaattctctctcttattacctgtgatgctgttaccgacaagtgcgtccgacaacagcatttgcttcctccaataagcgcagaatcctcaagagatctttaggtgctgaatgattggcgttaaacggtgcatattcgttgagctgtttaagcacctgctgcagctcgcataaatctcttcagaagcaagagtctatcttgagcatcacgtagcacggatgggataatttgatcggtaatagtagcaacctctttattcatcctgcccatcatcatcccctttctagttgccattttagtccttcacacaaatatatagacaaactaagtggacatggctccgtagagttcaggaaagaagcataatttgaatactagtacagaaacggaagtgaacccagatggacattgtactcagcaagtgtcttcccatcgtcaacaagctcattgccgtcaaattaaatgtgaggttgtcgccgaacatcttcacggaaacacatgatgcattgttctaatcggcgagcgtctgccctgcccacacacaaagatcgatgatctgcctctgctgcatgctcccggcccgtatcttcgccttgacatcgccattgcgcatcttcaccaaatcccattatctgtaaatcatgagacgaatcttttaagcctagttagttcatggttggacaatgtttatcaaatacaaacgaaaatattacagtgtcaaacttcaaaaaaaattttgcatctaaacaaagccttattaatttgcatcccactgagctttggccttcagaagactgacgaaatgcctgatggcgcaatcagaattaaggtccagcaccatagcgttccaagcacggccatcgaccggtcgctcgtcaacgcacgttgactgacttgtgggccaccccgtcgctccagccccaccacaacacccctttctttcctgaacaaaattatccggtaagcacgcgcttcgaactttctagcagcccatcgacgtgggtgacccggcctgcgtccaatcacatcactccacgtgtccaccattcaaggggcacacgagatcccagcccttggagcacgcagatctccccatcggacggcagagaccctcatccccgctcccgcaccacgtcaagtccgctggcgtcgcccattgagaaaccgccacgtggacaggatccaatcgcggccgtccgctcgtccacgtggccgtatcgcacccgcgtggaccgagcgcacgggtctcctggccccggcccgttttaaaggggctttcgtctccggcgcagagcgcgacgaactcatcactggtggtgctccgcagagtgaagcgaagcgaggcgagacgacgatgcgcaagtgggcgctctcctccgcgctgctcctcctcttcctcctcaccaccctccccgacccaggcatgaccccgcgtgccggagatctccagttttttacttttccgttgatttttgtgtgtgtgtgtgtggtttgtcgatcccggtgttctcgaggcgattggtggcggattccgtgtcgcccgatcactaattagctctgcccgtcggctcatcttagtttcgcgtagtgtttcctgtccagtctgtctgaatatgagcaccctgtgtgatggatcgcgcggtaaatttccgaccggaaggacacggtcgtagctgctactagattcgttgggggtagaggatggtgacactggatgcgatctctgctagaaaatttcattccaatttgttgctagatctcgtgttccgctagatggggaagtgagcggcccctggtcttttcgatccaatataatggcagggtttgtttcgagttcgagattgctgactagatcttcgattcgtcatggggctcttcacatttttcttttagtttactggtgatgagcatgtggtttgttccgtttgggggtttaatggggtttagacctgtaacttcatccatttttagctgttacctacatggatcttatctgcggggtaaatgtactgctcacttgactgatcaagtgctccagtatatcatgctatttttagtaaatttgaggactctctgcacatgtccctatcatactactcttggcgaattggtgaatttaaaggaccttctagtctagtggcagctttggtttccatttactgtgctgtacctgcataccaaaagcctacatataagtggaatttcaatcttgtactgaccctgcctattctgcagctaagaagctacaggtgaatgccgaggagagcagcgatgacttagctaacccaccgaaggtagaggagaagcttggtgctgtccctcatggtctgtctaccgactctgatgttgcccagaggtgcgcacggccttgtgatcagtgctgattattactgctttgccatgttatcgatactttttatgaacaatatgattttgttgtgtgcagggaagccgagtctatctctaggaagactctcaggagctcagccgagaagtttgagttccaagctgaggtgtccagactcatggacatcatcatcaactcactctacagcaacaaggatatctatttgagggagctcatctccaatgcctctgatgtatgtattacatctgatccctgtgtttattcttcattgtggatgcccaaaattaacactggtgttctgcatgtctgtaggctttggataagattaggttcctttcccttactgataaggaggttctgggcgaaggtgacactgcaaagcttgagattcaggtacgtgggatttcagtgcgagagcctttttttttttggcatcatatcttgctttagaattggaccttaaggcgtctggcctatgccaatgcagattaagttggacaaagagaagaagatcctctccattcgggataggggtattggtatgaccaaggaagatcttattaagaaccttggaaccattgctaagtctggaacttcaggtattgttccttcatctttccgtctgattactgcaatccaatatttgttaaatattataggattacgctctcaaataatttgaattgtttgccacctttgcagcttttgtggaaaagatgcagtccggaggtgacctcaatcttattggacagtttggtgttggtttctactctgtgtacttgcttgctgactatgtcgaagtggtcagcaagcacaatgatgataaacagtaagatatttttgtctgattttgtattcatgtgttgatttaccattgtagttgcctaatgttattgcggtgttgtactcttttagatatgtctgggaatcaaaagctgatggatcatttgctatctctgaggatacatggaatgagccccttggccgtggaactgagataagattacatctgcgagatgaggccaaggagtacttggaagaggataagctaaaggtatcaacacattcatttgtcttttgtttgggttaattgacttatgccgcaaaatatacaatgggtacgaggtagtttttagcttgtatgtgtatttcaacttgaagtccaacagtgttatctgaaatcaacatattttattagacttggacatgaccccaacagtgctaactaggaatttgaatcagattttttcagaagtcaagttgtcaatatgttttggttttagagcaatggcagattgcttagcatctgtctctggcaataatagtgcattcattaatgatgagataattttcgtgttactgtgtgagagcaagtgaaacatataggagtacctgtttgtcctgtccactacttggatttgatacatcgtaatgaaacacatctcttatagaccttataagacaagtatatctgtttgtgcatctgtagttacaagtgtttaatttgaattctcctttatgcaggatttggtgaagaagtactctgagttcatcaacttccctatctatttgtggtcgacgaaggaggttgatgttgaagtgccagctgatgagggtgagacaagtgatgaagaggattcaagtaagtctttagtgaagttgtttattctcctgagatggtagttatgtgtgttggtgctgacacatcatgtgtttcttaacagccccagaaactacagaggaagagacagaagaagatgaagagaaagagaaaaagcccaagacgaagacaataaaggagactacttctgaatgggaacttctgaatgatgtgaaggctgtatggcttcgcagcccaaaggaggttactgatgaagagtactcaaagttttaccactcactagcaaaggtaaatactgtagcaatgagttagtagtaaatgattgtttttaccaaagaaagctttgtttgtggatcttattgacgaaacatttgtataacttaacaattctttttcaggacttcggtgatgacaagcctatgggttggagccacttcactgctgaaggagatgttgagttcaaagctttgctcttcattcctccgaaggctccacatgatctctatgagagttactacaacagtaacaagtcaaacctcaagctgtatgttagaagagttttcatctctgatgaattcgatgaccttcttccgaagtatctcagctttttgagggtactgtattactatttcaagcaacacatactattcaattcaatccattgatacagcatacaaaatcttacagtaattttgtctttagggtattgttgactcagacacactgcccctgaatgtgtcacgagaaatgcttcagcaacatagcagtctcaagaccatcaagaagaagctgatccgtaaagctcttgatatgattaggaaacttgctgaagaagaccctgatgagtacagcaacaaggataagacaggtaatggggttttctgcaatgaatgcaagttatatactcatgattacaatactaaaaaaaatcatctgtaatcagatgaagagaaaagtgaggtggaagagaagaagggccagtacgccaagttctggaacgagtttggcaaatcaatcaagctgggtatcattgaagacgcaactaacaggaaccgccttgcaaagcttcttagatttgagaggtttgtcctctcttattcttttccaaacattgtcttgaattgtatgttttgggaaaaagaaaactgatcttatatttgcttgcctcagttccaagtcagatggcaaacttgcctcccttgatgagtacatttcaaggatgaagccagggcagaaagacatcttctacatcacgggaagcagcaaagaacagctggagaagtctccattccttgagaggctaaccaagaagaattacgaggtatgttgctgatcttgatgtaaaatagttatccagtctggagtcaagactggggcacttgttttgtcccttttagttttgctttttcgttggggtttatagtttgggatcttgatacaacagcttgtgaactaaagctgcccctgttttgttttgcaggttatcttcttcactgaccctgtggacgagtacctgatgcaatacctgatggactacgaggacaagaagttccagaacgtgtcaaaggagggcctcaagctgggcaaggactcgaagctcaaggagctcaaggaatcgttcaaggagctatccgactggtggaagaaggctctggagagcgagaacgtggactcggttaagattagcaaccggctgcacaacaccccctgcgtcgtcgtcacctccaagtatgggtggagcgccaacatggagaagatcatgcaggcgcagaccctgtcggactcgagcaagcaggcgtacatgcgtggcaagagggtgctcgagatcaaccccaggcaccccatcatcaaggagcttcgtgacaaggtcgcccaggacaacgaggtaccttacctaattaccttcacttcctcgtaagagctttacatacaaaccgtgatgggaggatgaatccatgctaattggtcgatgttaatttgtttgcctgttgatgcgatggaaacaacagagcgaagagctgaagcacacggcgaggctggtgtaccagacggccctgatggagagcgggttcaacctccccgaccccaaggagttcgcgtccagcatctacaagtcggtgcagaagagcctggacctgagccccgacgctaccgtggaggaggaagacgaggccgaggagcagcccgagatcgaagagaaggagtccaccaaggaggagtcggagccgtcctacgacaaggacgagctgtaggcgttgtctcgtctgccggatttgtgtttgaagtctagctagctcccgcttaggatgatgtgatattggggagttccactcactgccagtgtttaggaatgtgatgttctgagggacgacgcccatttttcccatgcaacgtgatacgggatttttgtctgtctttgtacctatacaaactttagttcagcctaattagtggtttgcatttaccttaccttgccatcccactccgtctggtgtggtcaggtgaactatctctgtctggttactgagctgaccgatagagtggcgcaccaaatttatttatactccctccgttctaatttaagttcttaacttttattcaggtactaaaaacatgaagccatattagttaaatcgtcatgactcatagatctatatgttacttgttgcaagtttgatgtttgcgggtattttggtatctcttaatcatcttttgctgctctgtaaactcttggatgctgtatttctgttgtttttaatggaaatggagaggtttctcgtaaaaaaaaaagttaaatcgtcatgtcacatattttgattgtgtatttgtatatgctaattttgatattgtagctgctaacatgttttactataaatctggtcaaaatttgataagcttgaaaccgaaaaaaataaaaaatggcatcatttagaacagggtaccaagaagtactaaggccttgtttagtttcaaaaaaattcaagattcttcgtcacatcgaatcttgcggcacatgtatggagtattgaatttagacgaaaacaaaaagtaattacacagtttgcctgtaaatcgcgagatgaatcttttaaccctaattagtccatgattggacaatatttaccataaacaaacgaaagtgctatagtacccaaaatccaaaatttttaccaactaaacaaggcctaacttgttgaaatatgagggatcttttcctaacaaaaagggtcccctcgcttcaaatagtaatatttagcaaacaaaaaaaatatttgactcaat

SEQ ID NO: 5101 - DNA, 7653 bp, Sorghum bicolor
gtcgtattgctctcctgtttctactagttttatatgttcaattcaaaagttttttttttcctttgaagaatgtctgctattgctttcatgcaatggtttgcttctgttgattcattttgctcagtgttttattttcctttcttcttttgacagcaggagtaaaactaaaatatggctgccttgccattggccaccgctgaagtatgtgatgctaatcctcatctgattatgaacggcgagctccgtgctctccagcccatcttccaaatctatggaaggcgccaagttttcgccggccctattgtcacactgaaggtctacgaggacaatgttctgatccgcgagttccttgaggagaaaggccacgggagagtccttgtggttgacggtggtgggagcatgcgctgtgccattcttggtggcaaccccgtccagcaggcacagaacaatgggtgggctggtattcttgtcaacggctgcatcagggatgtcgatgagatcaatggctgcgacattggtgtgcgagctctgagctcgcaccctatgaaggcaaacaagaaggggatgggggagaagcatgtccctgtcaacattgctggaaccaggatttgcgatggcgagtggctctacgccgatacggatggcattcttgtctcaaggactgaactgaccgtgtagagcggtcctggagcccatctgtatgtgtgtataagaatcgggcgcatgaaagcagggctactcctgaccttgcgctcttgctgttaaagcctgggcttgcaataacggattcttgctggatcacacatttatatttatatatacttagaataatcaaatgcttccatggttacaagatgttcttggactttttttttttgatctttgtgaactttctactctggtgatgaagtctgttcaacatgattaaactagatccccttgttggtgcagttttgaagctgagtattctgtgtcttggccctgggggtgctgccagtgccttgtgcctttgttcaagaatgtagtatagcttggaccatgatgatgtctcttttttgccaaaaaaaagattaataaatgagtatctgtgaaaaattacctaattaaatatggcattggacacggattctaggtcctcgtgtatacacttataattaggcattagatccaaaaaggttttggattttaacaccgtagtattttcgtttttatttgacaaacactgtctaatcataaaataactaggcttaaaagatttgtcttacgatttacaggcaaactgtacaattagtttttgtttttatctatatttaatgctccatacatatgtcgtaagattcgatgtgactaaacaaagccttagtttataactgcacttgtttcttttgtctttgtcaccaatcaacaaatgatgaatacctgatgaacagatgatgaatacctgattaagcgatgcatttcatcatttgaaaagaagctctgacgcatgccattaattaatcctacgatttcagctcaatatatatattttttctttttaaaagaaaagaagctgggaatacaatgacaaagtgatgacttggcacttatttaaagtagtacacaatggcaaatttaggccttgtttagttcccaacaaattttgcaaaatttttcagatttttcgtcacatcgaatctttagacgtatgcataaagtattaaatatagacgaaaataaaaactaattgtacagtttggtcggaattgatgagacgaatcttttaagcctagttagtctatgattagacaatatttgtcaaatacaaacgaaagtactactatttatattttgcaaaaaattttagaactaaacaagacctaagaaatttagggcacaggttttcaattctgtgaagttaattttagaaggatggaaattgggccctgactctttctgtttggtagggtggccaaaatttcccaacaaaaacagcaaacaggtcctcagcttacgagtggctttcctcttctcccctgccctcctcttctcccgctctctcgcgtctcttgtgggcaggccaggtcagtggtcaggtgcccgggcgttcgtcagttccttcgccggcgacgagcatccactacgtatgcgcacctcttctcacaagttcccgagacctaacttgttaagctatttggctattggtattgggatgcgatccagttacgagacctaactgcgtagcagtctaggtgttcgacgaaatgcctctgacacgggttgtgttcgtttctgtcccgctatctccaggacgatggtgggtctctctgaaggggagaagcacttcatctgcggcggcattgcgcaggacctccgcactgatggacgtaggcgactgcagttccgggccctctccgtccaaaccggagtcatcccacaggtgggtttcacagtttgtttggggggaggcatccgcatgcctttctcttttccttcttttctggaatgccctgtgggtttatgttgcttcggattggtggttgttacaggcgaatggctcagcgcgtgttagattgggggccactgaaataatcgctagtgtcaaggtaagagaccgtccttgcttgcatttgctgcaaatagggcaagacgagtatttttgcatgtctagttcaatcctctgtatgccatcttctattctcgacttagctttaaacttccaaacaagcaactctgatgttcccaagacaatgaggttatcagttattgaatgttattaagcattgggcatctatgttgcaaaactaatgctttaattcgattttgttatgtaaagctgtgaaccctgaaatcacaatgcaagttttgtttgagccgttctgagtgataataaacattacgccagaaagtcaacaagttggtgtctgtctatctgtctgttgatattgttactacttggataaacttgataaaataaagtcgttacaaatagtgtgttgtacctcttccatggtgtcatttcatttgacttgctctgttttcaatggcttggcatctgcaggctgaacttggaaaaccaagcattcttcaccctgacaaaggaaaagtttccatttttgttgactgtagtccaaccgctgagcctatgttcgaggttggtgattttctgtgactagatcaaatgaaaataacgaacagtctgatacattacttattatcatcatatacccaatgtttggcactgtggtctggactctgactttattcaagctcttttacatcttctatggagctatgcatataggctttgctgaaattttatgtttgaatgctaatgatgtgatgttgaatacgaagaagcaacaaacttattgactgaaaaataaagaagtcaccgggatggatttgaagaagcatttctctaattgttttttctgataatagctattttatatcttattactagtggcctggcctttattatttacaggtgcttctgcagatatgttccttttctagatgtctcgtttgattccagctagtagaaaaacagtattttcctttgtgcaggttatcgattgcctggtaaaacaatgctactagagaggaatatatatagaaaggaaaactttattttgttccatttcagatttcattctatttgaaaattgaaaattctattgttttacttttgtatgcatatcttatttcctttatttggagttttctagggtagaggttctgaagaattgtctgctgagctctctgtttccctgcaaagatgcttgctgggtggtaaaagtggtgctggtaagatatatatctttattgcctccctgaaatccttgtatttgacgtggtctgtgtacactgatctcctttagtttgatactcctaatatctccattgtttctctctatcatcagttataactactatttggacatgagtggcatcattatctatgtcgttatgaatggtagtatgattaattagatgtaccttccttaggttaagcttttgctaaccattgaattatacctagcaatttggatgtacgttattaagcacatttgcttagatacatcaactagagcggcatcacatatcagtactgttgattgccattcccatgccttttttagtttcacgtgcagtacataataatgttgtaagtgttattatggatgacttagacaaaaaaaagcatgcagttatttctgccagtcatcctacatttcatataaaggtgattttagtgcattgtagttgctgaactttcatatctctgtctgttcttcaaatttccagaggtttcatttagagattagtgtgttaacctgctgcagctcttctttgatcccattgtctgttatagtcaagaaatctgttatagtcaagaaatctttaatgagaaattgattctcatgttgttatctgtctgtttgcttgtatacagttttctttcaattcaaacttatgccaacaatattttgttgccatttaattgactacactgcattgaattgataacatgtctgtcatttcaggtgctgcaattgatctgtcgtccctaattgttgttgagggaaaggtctgctgggatctgtacattgatgggcttgtggtcagttctgatggtaatttgctagatgcgctagctgctgcaataaaggtgactttttgacttgtattgcttgttacttgcagttttaaatttcatattttcttccaactttttgaatggagcctagaatttccactttgcaaatgtattggtggaaaagtgtcatctgtgtccttatagacagtcatcaatgcatctgatatggaaaagattagaaattcaataatggaagtaattccattttttttttctgtcattaaatgaggttcgtccatgatagacatcaattaccttaattaacatggttagacaaatgttattcatagcttcaaataatttcatctcacgactgtcaaactcaaaagagtgtctccaagcaaaggaacacaaactgatctgtacatcccaatgttgaactgccaccgaggaccaagctttggcaaaattctgtcagtggatttacttattgaatggaaatatgaaaacatgaccacttgctagttaaatgttattatggacagccttattaaccagtgaaccaggccaaatatgtagtgtaaagaacaaactttgtgcggatagtcagcggacatattgaacactatgcagctgtttaagctgatgattccttcccttatcaggaaaaaaaaagatgtttccttcaaatggagtctgcatgcaccatctcattttcttgaatttgtgtttcgttctgggtataagcgtataacttcttcttatgctctcagctatccaaaaagtccctcaccctcaagaattccataatagggcatatcatagtttacgccaccagtgaggagtgcaaagggggctggggggggggggcacagttgatgtgagcgtggaaatgcaggggatagcaaaaagtggactcggcgaggagctgttgtgattaccagttacaacacagtccaagacaactcgtgctgcaacaggggaatttatttcttcgatggatacggctgcctttatatccaggcgtctactaacataccacacaacttaacgaactaaactaaatctcctcccacctaatctgatcttcccgcgcccatgcttgttcagtttgccacactggtttctggagccgatagacacggccaacaaatgtgtccacaacattacttctaaattcttacaaagttaggaaccagtgtttagttttagttaaggatgaaagtgacacttttcagtagatgatgggtgtaaccttaacctttcctggatttaacttcttttctccatctccccctttttgttttactttctttttgtgagaagatcctttttatctgtgctagcttaacaatacatggtgagctgtgtagatgattgaattactaccccaatattcactgatgcatttcttttgtgaatccaacttttatgtttaagagtttggtcaagtgacatgacaaccttggcatatcctcagatgattctatttgagataaagtgtttttctgaatgtaaaaggcaaaacgtccttgttatgagttgttatactgtctgatagccagcgcattagttgacattttgacacaatactgtgcaattagcacatttgtagggtgctaacattccatgtacatgtaggttgctttgagtgatacaggtataccaaaagttaatgtttctgttaatgctgcatctgacgaggagcctgaagttgatgtaagcgacgaggaatttctgcagtttgacacctccagtgtgcctgttattattacattaaccaaggtaatgtatttcttacccaactctttattctttggtgtttagtatgagtagacataggctttattgattgcatgattgttatgttcaaagtgtttaaaaatggcctacctccagtgtatgtaccttgagagctttgagctatctaatgatataaacttcaatactatccatgtcacattagacttagatacctcatatcatagtatgaatttctgtaccagttgaacgcccctgcattgacactttgacactacccagcaagcaattgggaccacaccaccagcgacaattgccttattatgcatgcagtatctatgtttcacacaaaattcagcaccctgtatgtgtttcatatggcaggtgggccggcactacatcgttgacgctacctcagaggaagaatcccagatgagttctgcagtgtcagtatcagttaacaggaatggccaaatatgtgggcttaccaagaggggaggtgcagggctggacccaagcgtcatcttcgatatgatatctgtcgccaagcatgtgagccagcagttcatctctctcttggattcagagattgccgccgctgaagctgaagaggctgagtgatgaaaggaaagaggaccggggaagagggtttatcgttgcgcaaatgctcgtgtgttcaacttcagccttgagagctgcttagaagagaagacgatttactgtagaaatgttcaggaatttggttcaatttttatgctgttagtaaacactgaagatttggatcctggcaaataggttcacgaacagtgtcgtgttggcttttattgggctcagaggaacatgcacaaggctggatcttgggtctgatgatctgatccccttgtgtccccagtctgatgatgaatttgcgcctctcaccctaccaaatactccctccgtcccaaattataaggtattctgagagtcaaagcattttaagtttgactaaaattatcaaaaaaaattataaagatttatgagatcaagtagatatattatgaaaaaaaatataatatctgctaacgctacggcggcatttcaagaagaccaaatgtaagcatggttcttagtgagttgtcaccatatagtttcctgtttagcttaatgatacttacttggtatcataaatgttatcattttatcatataaatttggtcaaatttgagatgctttgactctctaagattcttagaatgacttataatttaggatggagggggtattacggatctcctccgccttcaaacaattttgcacgcaaattttgaatc

SEQ ID NO: 5102 - DNA, 10927 bp, Sorghum bicolor
cgtacgtgtgcctacatatgatcaatcaataatcccttcatagttccccattcccaacagctagctagcaagagtttatctatccgatcctactcgctcctaaaaaccaacacaggcacagcaacgacgcaaagctcgctcctcgattgaaggagcgagaaaatggtaaaaaggagtagctagcattccacgtacgtgtctcaacaatctagaactgaatcggatgatgtgatcggagtaggagtgtactatatattacaattattactccctacgtcttaaattataagacgagtttgaccactcgtcttattcaaagaatttatacaattataatcaaatttaagtcattttttaaagaaaacttttattaataaactaagctatgataaaggaaatgatattctgcatatatttttgaataggacgggtgataaatttgatgtcagaaaagtcaaacgccttataatttgagatggattgagtagtatactatatcattccatcccattaccccatgcagagatgtgatacaagcagatcgaggtggcaatagattaattagtatctaaatccaaatgaaaacaccacaatcggtgtgtgtttctacatggtttctcctatctttttgtcaagtcctgttacttatattgctagagaagaactttatgattaggcttgggctagggctagagacatttccttcttcctcgaccttgtgatatattctagatagcagaaaattggagatttattatgtaaacatgatttgaaatatatttttgtggggatatgtgttgtggcttgtgggagtgtttgtgagggctcctgtccattttcattcattcttaatatgattttatgatacacaagtctcatgtgtgatcaagaaaaaatgatatagattcaaatactagaggttcatcgtgtggggctaactgattattagtttgcttttatctagattcattttcttgtcaaggacttctccccaagccaatgcatttgcttacctagtaccatggcatccaaagcaactccccgtcatgggtgaaacttgactcatgctgatgaaagataagaaagatggagtgggaccacttgttggaaacctagtgcaccaccgactcatcaccattgatgttgttgcttaccccatacctagtgagcttcattgcctaacttgtcccaattgttgttgaggtaatatctacacatcaaaattatgagccagggcatcaggtgaatcaaagagcatagatctttacgtgtggccaacactggacccggatcaacggctagtctataagcacacacacaaatctcctgcttcggagaaaggacaaaatgacaaaattccatcatggtaatacacacaagcgtgaggatgagaattgttgggtagtgcagcggcgaaaacaagagtggcgacagtgggttgagtagttggaggttgtgcgtgttatttattcatttatttatatatgtgtctcgatcttttttatctagaattgaccgagacacaaaggattttaatgaaattttaaaagaataaatttcaatgaaaatgaatcacatcaaaaatgttatattgaaggaaaatcaagttccttcctagaggaaagaaaatcagagtagtgcaaaatgtagaaaataaagaaatatttgttctctctctctctctatgtttgcccattcctttattttttcccttaattccacacatctcaaagtagcaatttctatattttagaatcctatatagtttttcactattaactctatcttatttctatatatattttttctattcctctcttttgcattttttttccaaacagatccaaagattatcaactcatggaggccctaagtttatgcacagatgtaaatgcagaatttttatactgaagaaggaccaaaacgtaatttgtgtgggtaacgggtgagcacgagcaggaatggaggctgttactgtgtttccaattccaattccatgttcgggttcggcgatgcagctcatcaattccatttccagctccagatcggagtaaatctgcttctgatcggattcgattggatttgattccggctgtgtcgaaccctagcttccatctcgatccaatcccagttccgcttcttcttcttcttcctcctccccggcagcagaggcggccgtcgtcgaatgagttgaagatgacggcatactcctcgtcctcctaggaaaggtcagggaaaggaaggattcgagggaagagaggaggctgttgggctcctcctccatggagggcgaggcggacggcggcggcgactccttcgtgctgcgctccggcgtccgcgcgggcctcaagcgcgaattcgccttcgccatcgcctcgcaggccgccctttcgtcctcatccgcacccctcggccgcacccgccgctcatcccgcacgctcaactcatcggccgcttcgacctcctccgccgccgcctcgacatcctccttctcaactcacgacaccaagccaaaggccaagcgcccgcgcccaccggatcctccccctccaccagaggatgcccccgcgcccggagaagatcatgaaggggccgctgtcgagctgcccggccccgtgctcgccttgatggctgccgctgggcccagccctccgccgacgccttcgactccgcaaccccatgccggcgcggatgcggatccggcacaccgcgacaacatcatcatcccgccggagtcgtcgcccaggcgcatcacgcgctccatgctccagcccaagtctccccctcccaccgctgctcgttctcctgacaatgtggctccgctcaaacccaaaccggaaccgccggaggaagaggagcccgttccagcgttgaggcgcttcaccagatcactcttggtcaaggataaggacagcaacgacgacgacctctcaggcaccaccaccgccagcaatgcctcctcctcccctccactcaacaccaccactaccaccacaagtaccagcagcaacaagaggaataagaatacaaacaagattcccaccaacctcagggagctgctcgccaccggcctgcttgaaggtcagcccgtcaagtatatcatgaggaaaggcaaggtatgtatgtcgccatactttctctatttactgacccaatgttaaatcataaatctgttcccttcactcttctttcttactaagaaatgtgagcaaaaataaattccaatgaaaaaataatctaaaatagattgcatgtttcttaatgatttcatttcatacacttgtcaaggtgtcagatgcaccaaagtaataagacacaatgctggataggttagtactaccttcgttccaaattgtaagctgttcctgcttttctggatacatagtttttgcaatttggaacggatggagtataaaataacaaaacaaaacaagtgcttcgtcacttctgtgatatgagcatggcctactgcacctgtattgtcttttcggcaaagaaaagaaaagaaaagaaaagaaaaacatgacgcattatggtgaatgtaagatgtgatctctattttctgctttggattggatgctaagatatcataccatgcacttgcgttttccatgtcttattctgtgggcagtatcgtgggtactgtaattttgaccagggatctatttctcatcttatttcagcgagcagtactccgtggagttatcaaacgcatcggcatactgtgctcatgctcttcatgcaaaggccgaaaagtgagttttctcctcttctccaaaatcaccacctatttatccctgctttgagaattgaagcaatggaacatgagttgcaggttgtttcaccttactactttgaggtgcatgctgggagtacgaaaaagcacccatccgattacattttcctggaaaatggaaataatctgcatgatgtattgagggcatgcacaaatgttacgttagacatgctggagtctgcagtacggaaggcaataggcccagcacctcagaagagaacattcagatgcaaaggctgcaaaagtttgttgttcctccccccatccctacgttgcttggctttgttaattgctcagatgttgatatatatatatatatatataacatttcaggttcattcagcacactctgcagtgggaaatttgctttgttttgtgactcatgtcttgagtccaagggtgctaagaataatagcaggtaacctttgtaacagatgtgtccattccatttttcatcacattgaaatattttcctggggttccaaaccattggttgcttgcctgcttttattttaggtcgtccaaagttggacgaagtccaacttcatctgccaaggtatataagagtgcctcaccaggagcaaagtcttcaagtgtaggaaggcttacaagaaagtaggcattgtcgtttatgataagcatccttatccttgaatttctcaactctcattgatcccctttttgttattttatgaaaaaaagggataaggggatgcataaggttgttttcatgagtggcgttttacaagagggcactgatgttggctactatgttggtggaaaggtcattttcttattttctctcaaattactgttttcagccggtacaaatgtttttttattgacacttgaagtgaaatctctagaggttactggatggatatataaaggcatttgggatctactgtcattgctgcagcacagtggtacgttggtagtccagttcaatggaatgtaacacaactgataagtcagcctagtctaattcaatctgtttaattcaatgaacaggttagtccttcacagtttgaagctcatgctggtcgagctgctcgacggaaaccgtgagtttattcttgctgtttattttttgcagtttattgttactgttgttttttgtaaagagtacaattcaaactctaataccttccacaaacactattgtagttaccacaacatatatatgtcgaacggcgtatcactacatgagctgtcaatttcactcttgaaaggtcaaaagatgtcaaacagacaaagtgatgacttgtgcagcatttgttcagatggtgggcaactactgctttgtgatacctgtccaagagcttttcacagaggtaatgatgttatgcatagtcaatatgagatggtgcctctttgcttcctgcttaattaagctaccttttgtttaggatactgtttaaatatatgttctcttgtggaatagctgaattattgtatatagcgattttactaatgcttaaaatccaggtttcagacctgaaacttaggccttgtttagttgaggaggtgaaaagattttgggtactgtagcattttgtttttatttggcaattattgtccaaccatggattaactagactcaaaagattcgtctcgcaaattacaggcaaactgcgcaagtagttattttttatctatatttaatgttctatgcatgtgccgcaagattcgatgtgacggggaatcttgaaaagtttttgggttttgggtgtaactaaacatggccttgccaaaatcatgtcataactcataacactaagttggatttgtagtctacatgggggtttcttgttgtattatatttttctttaaggggccatttgaatcctttcattttggaggaattggaatctacttaatagattaggctatttggcttggaatttgacattccacaacttttccatgttcacataaacctatctcaaattcatagggtgagagatagaaatcgattctatggatcatcatgctatgtttctactctccaacttataccatgctcttcaatttgcttccgtatagtagaaatgcaacatataagtatctcccttgtatggctaacaataatatacaaatatattttatatagaacaatattagcgtaattaatttgtgcctaaattataattattagaatgaattcaattccaaagattcaaacgggacaattctgcatttttatttttacacttgtgcttaagctcaactgtttcttattgtcgtcttgcagttcttacttctaacctctggcgtttaatcaagaactctgtttcacacatttcttttggtgaactcctttgaacagggtcgcatttcttagttttcattaatgtgtgctgtattccctccctatttatctcttgtagaatgtgttagcttatcttctgccccgaagggaacttggtgttgccgatattgtgagaatagacaacagagggaaagttgtttggcatataacaacaatgcaatagctgctgggagggttgaaggagttgatgccttggaacaaatatttacacggtcaatacgtattgctacaacacctgagactggatttggtggttgcgcactgtgcaagtaagtgttcttccatggcacggtgcttgtatatccactctggcctacttttcttttacactaatcataaaatacatgtacttccaatcttaactaaaacatttcgtatgccagcagagcaaatttgccaaacttctcatcaagtagtggtatttgttgtataggctggttaaggaagctaaagctcagcgtccaagtgcttaatcttaaggatggggacggccctccaaatggatacccgcggttcttctctagtgtaatttaatgaactaaatagataatttctttcctcatttttttcacttagttcatttagttacagtagagaagaaccgcgggtatccgtttggagcaccgtccccatccttacttaatctctttactcgttttgaactctctgattactttggcataaatgttactttcattaatcttgctttaatctttatttgccctagttaattctgtgttagcactagtcatggtcgtttatgaatgtttggcgctaagtatttaccagtttgtgaaagttgtatcattggtacttttttttatcaaatttacaacttttgttttcccccttgttatttatatatgcttctattcgatgctctgaagttcccaattgtctttcctttcacaaatatatataatccatggagattttctgtttgaattatttggcaggctccatgatttcagcaaaaagaaattcagtacccggaccgtgctgctttgtgaccaagtacgtttctgaatcatatagtgttgtataaaccatggtttgcctctgtcagtgctgatagtagtgcccttccatggtttatgtacagtgtaactcctgctgtttctgtgttctgcttcttaggaggcagcagtgacagtttggttttgtaagataagtcattcatgtgtcttttttgatgaccagtgtggtagagaatatcatgttggttgcctcaaggaacataatatggctgatctgacggtgatatttctaacctgagacatctagcagagtttgtacccgaaaactagcaccatactaatgattaacttgtgcaggcattgcctgagggagcatggtattgttctacggactgtgtgcggattaaccagacactgcaagatttacttaaccatggaggagaacctgttcctaccatggatttagatgttattaagaagaaacgagaagtgaaaggttttaatgaggatgctgaccttgatgttagatggagagttttaaaggacaagagctcggatgatagtaaactagtgctctccaaagcagttgccattttccatgtgagtttctgttgcttcatactgtatgttaattttttatgacagttgcccattgattctttgtcaaaacttggtagaattttcaataagctatggtcagttattgtggctcattatgaatagatgaccgtgggccaggacagcccacacaggctggcagcagtggacccagccaaaccctgccgtgtgtcaaggtggcaaccaggccactgcccgtgtccacatcaagtatagggttttccggagtcggattattaggaagtgacctggtgaatccctcctatcacctagctctcacctgtctccctggttgctgtccacgcgagcagtacttgcctccctgcttcctctctgcctcgcttgtgttctctagatccttgcccataacaccaggatattgtgaaatctacattatgttattaagaaaagaaagggaaaccattattatgcaggattgtgtggagcatattttttttttataagaggaattgaaacatagccgaaatcttgttttgcacattcccaatgggagaatatctggtgcaaactctcagtggaatagtgaaaacccactcaaaatacatagaagtttaaaaaatttctccaaaactccatagatgtagatgagatggtaacatgtaacagacatgtatataaaatttcaagaataaacttcatgttcatatattggcaggacttgcattctaccaagtaggggctttgcattgaacatctccctattcaccatttcatgagtaactttgaaggcctgccagtttatttaagcaattaagctactatataaatcaacaaaaaaagtctgacagaataaatcaggcccaacttatagaagatgaaatgattgcagattctgcttagcaggcataaattttgtttgtttgtttacaatacctgagatgcatccttttatctatttagtagtcagtttttttgattgtcactttaatgtactatatattgcacttttctgcaggaaacttttgatcccattatccaggtttcaactgggcgggacctcattccagccatggtttatgggtatggactagtatcggcctcttttatttctgtcagacaaatcaaaattgtggcaattatatacttttgtttccaggaggagtgcaagggatcaagattacacaggaatgtattgtgctgtgttaactgtgaagtaagtttttgtctcagattgtgtcttgctgaaaattaatgatattgtcaatcaaatgtttttttgttacacagcttgaattttaatatttttatgcagcaatactgtagtttccgcgggtcttttccgcatcatgggtaatgaaattgctgagcttccgttggttgctacaagtagggatagccaaggtttggtaagttcgtcaagctatcggatgtattatgattcaagttttcattgaaccatgaagaatgaatattttgagcatatggagtctgaactaaacaagctccatggatcatgcatatgtgcccatacatagttgctccaacaccacatacgatctgcaaacatgctgtattttcttcataactgcttaacctttggcttaaaaaaaacttgcttagccttcgaaagatgttttggattggtagatatatcatacttgatgttttagttattggggaagcgattagtaattggattattaatttgaatgtaactgcacagttggggctttccttgttgaaaagtcatgtgctgttgctgagacaagatctgaggtatcgcaacattgatctttctttccttctgtgaactgagcaggggtatttccaagcacttttttcctgcatagaacggctgttggcatctttggaggtgaaacattttgtgctaccagctgcagaggaagcagagtctatctggacagaacgttttgggttcacaaagataagccaggatgaggtctgtatatgttcctaggttcaactttctagcatgcctgaggatgatgaattaacttgaggttgtaatgatgtaaaattgttgaatgctgcagctgcgtgaatacctcaagggtgggcgaacaactgtgtttcaggggacgtcaaacctacacaagctggttgcgaaagttgaatgctagttatgtgcatgggaggaagagcaaggacatgaagctaagaagcagctgaatgtttgcgtgcctctgggattgacgcagtaggaaaggcgcaccctgatccctttcttctaaatgttggcgagcatggtggtattggcatcttgatctgtttccatagctaaaggtgaagaagattgtgtaagatacaagggacaagctgcaaaggcaaaagccaaagctgagtgaatttcaggcaccttattgggtggcggtatgcgcgttgtgggacgctgtgtttgttgagtaggtgttagctggggctggagtgagatggcgagttggtgactacatttgtgttctgttggtgggtttttcactgctaaggtgactgttgtatctgttgatatctttctgttttatgatagtggcagtgataccaggctgttaggagtggggtggggaggtttcaaattcaacgtacgtcatgaacatgtgattcctctttattggcctgactcacccatggatgttagtgtggatgcaatgtagacatgtagtacagctgttgtaatgtaacataagtattgctttccccgcctatttaacatatttaatttgctgcgaattcctagaggctggtgcagcttagtgaatcgtcaaatataatcggttgtgatggataccagaccagtttgggtttgtttggctgctctcctattcacctcaatttacattcaatccatgtatgttgaggtgaattagtgtggaatttaaacttatacttcaatccactttagaatatgatcacctgccaaacaaaaaggattcacctcaacatacatggatcctaattcggtacctcaacatacatggattgaataggagcacagccaaacaagttctttggtgtcttatacatgtagttgtattttctctggaaatcatccacatgctgctgtgctctataatgtggagaacttgcagctcatttgaaagtagttaagaaatcttcgtacttttatgtttgtaaatatgcttagctcgtcgatggcagcaggtgctgctgcttcttccaaaaagtatggacggacggagcatgctatcttctatcttctattatgca

SEQ ID NO: 5103 - DNA, 3948 bp, Sorghum bicolor
actagagcatgtagtatgggcggttgtagtttgtgctcattcaatattaatttacagtaaagactgattattatttgaattaggacaatatttgatattgacgtggaaaccgcatttgaggagaagccatggaaatccctggtgctgatatttcagacttttttaactttggccttgatgaagagaagtggaaagatttttgcaagcagctggtgagtccatttcttacatttggtagcgcgtatagtttgtttggttactttatataaacaatcaattaaacaagaattcttttatcgccaggaccaacttcgactagaatccacaatgcaatctagaatacgggtgtacgaaagtggccgttccgaacaggtttattacgatcccattatggaaaacaatatcctgctctatctgtagtgatgatgaataattttttatctgcatccaggattatgacccagatttgccaccggagctagcggctgtgactggtcatccagacatctctgctgacagtcgcaataaaacggataacagccatacagattttagtgcccaaggaagaggtccggcaaacgtgcggacaccagtggtattgagtttgcctccatctctagaatcttacacctgattcatgtttgcttttgaatctgttttgtcgttgtatggtttctcatattatgggcttattatgggcgtaagatagaccattacttaagattattgacgtatcatgttgtctgtatgccacatattggtgttcccccacaatctataaagagtttttttttatagttatcggcaacagagcaaacacgaatttataccattaacaaccatccatctatgtgttgttttcctgtttaactactagtacacgggtttgatcctacaaaatcaatacatattccatagcgttttcttcgcttggaggcttggacacgtgcgggtgttaatgtttggtcctcggagtatttttcttgtagttttggatgcatgctgtttatttttcttcaatcttcattattctgtgccaacatatttgcattatgtagtgatgtgagtttgctttttcagatgacagggagacctatacaagttgaaactaattatacagaccggtttccatctgttgattcacgcccacatcgaatgcgtgaatcagattctgttattgaggtaaaatgttttcatgatcagatccatgttttatctgttccgtgtggaaacatgttatgctgtttggattccatgttagttaatcatcaggcactcttaacatttccttgccttttagattgtgtgccagggccgtgattcaatggatgatgagacagtggaccaaactgaaaaggattctcaaggaggtaataaaggagtccatgatgttgaggagggaaagtcgtatccatcggataagattaataattctggctataactcatattcggtgataaagacagaacataagagacagctaccagtttcatctgaaagtgatatgttatccacggatgtcaatgctcattcccctcccagctacaaaacaagagtgttctcctcgtggatcaatgtatgccgtacttgttgaaatatgcaataggatatcacaaaaatatttggttcatgtttttatgactcttatctgttggtgttatttccttgatgaggtcgttgcacacactgctcatcttactcatagattctcattttacgcttatcatatttaaacaaaccaatcaattgtgctgcctgctgtaacattgctgctctgtttgggagcgtagctgggctcaaagttattgggggtaggacagcggttatggctacagctgaaacatctgaagccaaaagagcgaactgatttgggcaactaaaatttggacctgaaagaaccttcttaattgtgtcatgtggtgattcaagttcgagatgcatgcacaacatggatgtgcagcagcgcaaggatcaaaccaggcctatttgcagattagttagtgggtttgcatgtttagcctgttgggttggctttaggagatttggtttactaggattgattagcttgttaggaaccttgggagattgatcaggagatgtcatcagtgtcctatataaacctatggatggtgtaggcaaagatttaactccaatttatcctatctcctactctgttcctgcctcgagggtgatgagctgaccatggctctgctgtcacgccatcgaggtccagggccacgcccaccccacaactatgccctatgctatcaccatccacctccctccaatgcccccctacatcacaaaattttcagtattttttattccatatagacaatgcagttgtaaaatctcctgattttcagtcatacatgggatacaacatagtacatatgctgttgcacaagaatctacacacagatttcttcttcagaagatggcgtaagttaataaatttatgaacaaacgtacaaaccttttctactgatagtcttatacaaaatgttcttccgttagatgttatggccttttataagtaatgaaaagtggggaaaatagtggtcttctttaattagtgacaagtaaacactaaatagttgatgttctttaaggaaaaatattgaaaggaaaatgggaatagtctattttactaccatgaataattcactttgctagcttgaccctcaaaattttgactcactttaactcccctaaactatttgaaattgtccaaaccaatccagaacaacaacatcaacaacatagcctttcagtcgcaagcaagttggggtaggctagagttgaaacccaccaagagcccctagtcatggttcaggcacttcaatagctgctttccaatctaatccctaattagaattttcttatacgcctatcctcataacatttggatttaggttcggattggattttaatttgaggttcaaaatttgcagggtcatagctgacatcatacattatgctgtaaaaaaattaaaaatacatatgttttctaataattttcaaagggagggagggggatgtctctgtttctttcttctgtatttgtcttatgttttcattgctccatttgctttagtatctcttaaacagtattcgtgcctaaatcctcccatttttgttgaagttatatttctaacacttgcccaaattatttatcttaaggtcattgaaaggaagctcactgggtcagaactctattcgagaaactgaaagctccaacgaagtaatacctcgtcagtcatcttcaaagagacaccatgattcccggaaagagaaccttgttgagggctcagaaaataagggtgactcagaagggtcacttgctgctaatgatgacgtggcagataaactgagtacagaagatcattttgatggtggtggtggtggtggtgatgatgatgatgatgataagctcgcattggttggtagtgttgaagtggatggtgatgatgctacctcagaccccaacacgcctagtgatgcaaatgaggatgatagcctggttcactctgataaaaagcacaaacatatatctgtggttgaacaacctactggacacaatagcagtgaagctgatgaattgagggctagtgaaaatagtaaagggaggtctggtagcagcaaagatcagcagaaacgccttgaatctggtgaagaagttcttcaagataggcaatcaaggagagtaaataatgtaagaaggcatcatgacgcggaagaacgcaacctccgccgaaaagatgagtactcacgtgatgtaaaatcagatttggaaagatcacatttaccctccagaggcagggaagatgtccaccaatcttatgcaaacagagatcgggtaacatgcggttaggagttatgatagggtaagagagccaaaaagttggccaaggagcgcgttcgctcctcatacaaatcaactcccat

SEQ ID NO: 5104 - DNA, 2905 bp, Sorghum bicolor
ttgaaatatatattattaatttaaatttaataaaatagaataaataagggaagtttagatataaaaatatttcctagatccagttgatgcatgctgatctagtagatatagtaaatattttttattttgcaactttggatatgacatactaacttgattagcattatttttattattcggccttggtatctatggcgacttcctttttaacatttcttaatttgaacaaagctgaacctgtattgacaagaaaaaaaacatgcacgtaacataatcaaaatattttgtatgtgacagggtttgtcaaagcaataaatataaccctatcattatagttatttatatgatgagttaatgacaagtgacaaggtgtatatgattagttgcaaatacccagaaccatatagtattattacacgagataatcatacatatacacaaatgaatgttgtgcgtataccgtgccataactatcgtgcatgctcctatattagatatggaagaaatccacgtacagatatagccaatattttatggttgatttattcaaactcttacctcttatagataataggtgtaccatagcaaaagccaaatcatcttttaatttggaattagagtgagtatttggttaataaggcatcgatatgtggctggaacgttcaaaaaggtgtacccaaaatttgttcaggaagtttctgagcaaatttatcttgggctagcccctatatatattgcatatttgcatcatgcacatgtacacaaaagtaagctaagctttccctattgaaaagtgaaaccggtagcaaccatacgaacgtactgtccaaactaacagtcgtaccggggcgatgacgcgcaaacgccacaggggccatggtcaacctaccggccaatgctgcggagaacatgcatctttcggttcacgtacgttacgccacgaccagatgccgccacccaagaattcctgctcatccacattatcatacacagctagcacaaatcattggcatgtcacatggggtgttattcccctcgatgtatatttctatccatactctatctcgattacatatatatataaataactggcgacggataggataattgccttcattctgtcttctttcagtgtagatacgaaccatgttacggtcgacgcggccatgaactgggccttcatcgatcagcgccaagtatctcttcatatctttgtattggccttctcccttggagccaagcgtcaacacctcaattcaagttccttgtcaaaaaaaaaaagaaaagaagaaaacacctcaattcaagtaaatgcatgtttttttcttcccacgatggcgattatatatgttctgatggcagttagcacatggcttgtgtaggcaggaacaggttgtcatacgccagggcatacgcaactccaggtaacaataggttagcagctcctctataaatacctggagtccgaaggcaatgtccatcatccacgttccagcctgattacatgcaaaacattcttgcttgatctacaccatagaactatctgagccattattaatatttgtggtcaaaagttccatggcgattaagcattttgtagttatgctgctgcctatggccctcctgctcctcgcaacaggtagctcaccggtggtggctcagctggagctcggctactacagcaagacatgcccgaacgccgaggcgatcgtccgcgccgagatggagaagatcatctcagctgcacccagccttgctggcccgctcctcaggcttcatttccacgactgctttgtcagggtaagttcgttacacctagctattcaacaatggcgcacaaacgtcgtatcgtatcgtattcgccagtttaatttgtcgtagtacatatacttctagtcatcattgtgtgtatccagcactagcattgatcgacgtttgcgctgatcgcaatggagctgacagaaaaccaaacaatgctcatgctcgcatcacaaaattgcagggatgtgacgcttctgtcctgctcgactccaccgagggcaacctggcagagagggacgccaagccgaacaagagcctccggggatttggttccgtggagagggtgaaggccaagctcgaggccgcctgccctaacaccgtttcctgtgccgacgtcctcaccctcatggcccgtgatgccgttgtgctggccaagggcccctcctggccggtggcgctcgggaggcgagacggccgtgtgtccagcgcaacggaggcggccgagcagctacccccagcgcacggtgacatccccctgctcaccaagattttcgcttccaaaggcctcgacgtcaaggacctcgccgtcctctccggcgcgcatacccttggcacggcgcactgcccgtcctacgccggccggctctacaactacagcagcgcctacaacgcggacccctccctcgacagcgagtacgccgacaggctcaggacgcgctgcaagagcgtcgacgacagggccatgctttccgagatggatcccggcagctacaagaccttcgacacgagctactatcgccacgttgccaagcgcaggggactgttccagtccgacgccgcgctcctcaccgatgcaaccaccagggagtacgtccagcgcattgccactggcaagttcgacgacgtgttctttaaggacttcagcgagtccatgatcaagatgggcaacgttggcgtgatcaccggtgctgacggggaaattaggaagaaatgctacatcgtcaactaaagtatatatcagcacgttgtaaatgatagggcgcatacctgtctgttgttcatcaatgtaatgtattaattatattgcaagtaaattcattctttctcagtacgataatgtcaatggcgtcagataaactggagc

SEQ ID NO: 5105 - DNA, 253 bp, Sorghum bicolor
tgaatgaagatatgaagaagaagacgacgacgatgaagaaggcgaagaaaagcgaacaaagagctcccttcgatccaatccaggaggggaagtggtcggttgcagctgccggttcatggatgcctctctggtgcagcaatgactgatgctcacctgcacttgcatgggtgtgcatgacccgggagatgaacccaccatcatctttccctcgtgcttggattgaagggagctcctctctctttctctctttctc
